(19) United States
(12) Patent Application Publication
(10) Pub. No.: US 2024/0229038 A1
(43) Pub. Date: Jul. 11, 2024

(54) GENOME EDITING COMPOSITIONS AND METHODS FOR TREATMENT OF WILSON'S DISEASE

(71) Applicant: PRIME MEDICINE, INC., Cambridge, MA (US)

(72) Inventors: Jonathan M. LEVY, Brookline, MA (US); Wei Hsi YEH, Cambridge, MA (US); Aaron Nakwon CHANG, Lexington, MA (US)

(21) Appl. No.: 18/412,097

(22) Filed: Jan. 12, 2024

Related U.S. Application Data
(63) Continuation of application No. PCT/US2022/073819, filed on Jul. 16, 2022.
(60) Provisional application No. 63/222,480, filed on Jul. 16, 2021.

(51) Int. Cl. C12N 15/113; C12N 15/88

(52) U.S. Cl. CPC C12N 15/1137; C12N 15/88; C12N 2310/20

(57) ABSTRACT

Provided herein are compositions and methods of using prime editing systems comprising prime editors and prime editing guide RNAs for treatment of genetic disorders.

### CROSS-REFERENCE

[0001] This application is a continuation of International Application No. PCT/US2022/073819, filed on Jul. 16, 2022, which claims the benefit of U.S. Provisional Application No. 63/222,480, filed Jul. 16, 2021, each of which applications are incorporated herein by reference in their entirety.

### SEQUENCE LISTING

[0002] The instant application contains a Sequence Listing which has been submitted electronically in XML file format and is hereby incorporated by reference in its entirety. Said XML copy, created on Jan. 12, 2024, is named 59761-722_301_SL.xml and is 13,605,907 bytes in size.

### BACKGROUND

[0003] Wilson's disease is caused by homozygous or compound heterozygous mutations in the ATP7B gene (OMIM #606882), which is mainly expressed in hepatic and neural tissues and encodes a transmembrane copper-transporting P-type ATPase of the same name. ATP7B is located in the human genome on 13q14.3 and contains 20 introns and 21 exons, for a total genomic length of 80 kb. Wilson's disease is an autosomal recessive genetic copper storage disorder caused by mutations in the ATP7B gene, which is expressed mainly in hepatocytes and functions in the transmembrane transport of copper. ATP7B deficiencies may lead to decreased hepatocellular excretion of copper into bile that may lead to systemic copper buildup, hepatic and neural toxicity, and early demise. The accumulation of copper can be manifested as neurological or psychiatric symptom. Over time without proper treatments, high copper levels can cause life-threatening organ damage.

[0004] Current treatment approaches for Wilson's disease are daily oral therapy with chelating agents (such as penicillamine [Cuprimine] and trientine hydrochloride [Syprine]), zinc (to block enterocyte absorption of copper), and tetrathiomolybdate (TM), a copper chelator that forms complexes with albumin in the circulation; all of which require the affected individual to take medicines for their whole life. Furthermore, those treatments may cause side effects, such as drug induced lupus, myasthenia, paradoxical worsening, and do not restore normal copper metabolism. Liver transplantation is curative for Wilson's disease but transplant recipients are required to maintain a constant immune suppression regimen to prevent rejection. Therapeutic strategies, such as gene therapy, that can reverse the underlying metabolic defect would be greatly advantageous. However, the ATP7B gene is approximately 4.4 kb, nearing the adeno-associated virus (AAV) packaging size limit and making gene therapy approaches with the full-length gene difficult.

[0005] This disclosure provides prime editing methods and compositions for correcting mutations associated with Wilson's disease.

### SUMMARY OF THE DISCLOSURE

[0006] In one aspect, provided herein is a prime editing guide RNA (PEgRNA) comprising: (a) a spacer that is complementary to a search target sequence on a first strand of an ATP7B gene, wherein the spacer comprises at its 3′ end SEQ ID NO: 2128; (b) a gRNA core capable of binding to a Cas9 protein; (c) an extension arm comprising: (i) an editing template that comprises a region of complementarity to an editing target sequence on a second strand of the ATP7B gene, and (ii) a primer binding site that comprises at its 5′ end a sequence that is a reverse complement of nucleotides 11-13 of SEQ ID NO: 2128; wherein the first strand and second strand are complementary to each other and wherein the editing target sequence on the second strand is complementary to a portion of the ATP7B gene comprising a c.2333G>T substitution.

[0007] In one aspect, provided herein is a prime editing guide RNA (PEgRNA) comprising: (a) a spacer comprising at its 3′ end nucleotides SEQ ID NO: 2128; (b) a gRNA core capable of binding to a Cas9 protein, and (c) an extension arm comprising: (i) an editing template comprising at its 3′ end any one of SEQ ID NOs: 2152-2161, and (ii) a primer binding site (PBS) comprising at its 5′ end a sequence that is a reverse complement of nucleotides 11-13 of SEQ ID NO: 2128.

[0008] In some embodiments, the spacer of the PEgRNA is from 16 to 22 nucleotides in length. In some embodiments, the spacer of the PEgRNA comprises at its 3′ end any one of SEQ ID NOs: 2129-2134. In some embodiments, the spacer of the PEgRNA comprises at its 3′ end SEQ ID NO: 2132. In some embodiments, the spacer of the PEgRNA is 20 nucleotides in length. In some embodiments, the PEgRNA of any one of aspects above, comprising from 5′ to 3′, the spacer, the gRNA core, the RTT, and the PBS. In some embodiments, the spacer, the gRNA core, the RTT, and the PBS form a contiguous sequence in a single molecule.

[0009] In some embodiments, the editing template comprises SEQ ID NO: 2152 at its 3′ end and encodes a CGG-to-CTG PAM silencing edit. In some embodiments, the editing template comprises at its 3′ end SEQ ID NO: 2168, 2176, 2190, 2200, 2221, 2225, 2244, 2255, 2262, 2272, 2292, 2305, 2309, 2321, or 2340. In some embodiments, the editing template comprises SEQ ID NO: 2153 at its 3′ end and encodes a CGG-to-CTC PAM silencing edit. In some embodiments, the editing template comprises at its 3′ end SEQ ID NO: 2173, 2179, 2198, 2202, 2222, 2229, 2236, 2259, 2264, 2276, 2284, 2306, 2316, 2322, or 2339. In some embodiments, the editing template comprises SEQ ID NO: 2154 at its 3′ end and encodes a CGG-to-CGT PAM silencing edit. In some embodiments, the editing template comprises at its 3′ end SEQ ID NO: 2166, 2177, 2189, 2204, 2218, 2232, 2242, 2250, 2271, 2280, 2288, 2303, 2311, 2325, or 2336. In some embodiments, the editing template comprises SEQ ID NO: 2155 at its 3′ end and encodes a CGG-to-CGA PAM silencing edit. In some embodiments, the editing template comprises at its 3′ end SEQ ID NO: 2167, 2182, 2195, 2211, 2216, 2227, 2245, 2254, 2260, 2282, 2290, 2298, 2319, 2330, or 2337. In some embodiments, the editing template comprises SEQ ID NO: 2156 at its 3′ end and encodes a CCGG-to-TCTA PAM silencing edit. In some embodiments, the editing template comprises at its 3′ end SEQ ID NO: 2164, 2187, 2193, 2210, 2217, 2228, 2241, 2251, 2266, 2283, 2287, 2296, 2308, 2327, or 2342.

[0010] In some embodiments, the editing template comprises SEQ ID NO: 2157 at its 3′ end and encodes a CGG-to-CTT PAM silencing edit. In some embodiments, the editing template comprises at its 3′ end SEQ ID NO: 2174, 2185, 2188, 2205, 2212, 2233, 2237, 2258, 2265, 2274, 2291, 2300, 2310, 2331, or 2332. In some embodiments, the editing template comprises SEQ ID NO: 2158 at its 3′ end and encodes a CCGG-to-TCTG PAM silencing edit. In some embodiments, the editing template comprises at its 3′ end SEQ ID NO: 2170, 2178, 2199, 2207, 2219, 2230, 2239, 2248, 2261, 2275, 2294, 2301, 2312, 2323, or 2334.

[0011] In some embodiments, the editing template comprises SEQ ID NO: 2159 at its 3′ end and encodes a CGG-to-CGC PAM silencing edit. In some embodiments, the editing template comprises at its 3′ end SEQ ID NO: 2165, 2183, 2194, 2201, 2215, 2235, 2240, 2249, 2269, 2277, 2285, 2302, 2318, 2326, or 2333. In some embodiments, the editing template comprises SEQ ID NO: 2160 at its 3′ end and encodes a CGG-to-CTA PAM silencing edit.

[0012] In some embodiments, the editing template comprises at its 3′ end SEQ ID NO: 2171, 2186, 2196, 2206, 2214, 2224, 2243, 2252, 2268, 2281, 2293, 2299, 2314, 2329, or 2335. In some embodiments, the editing template comprises SEQ ID NO: 2161 at its 3′ end and encodes a CCGG-to-TCTC PAM silencing edit. In some embodiments, the editing template comprises at its 3′ end SEQ ID NO: 2172, 2181, 2197, 2203, 2213, 2231, 2246, 2253, 2267, 2273, 2289, 2304, 2317, 2328, or 2341. In some embodiments, the editing template comprises SEQ ID NO: 2162 at its 3′ end. In some embodiments, the editing template comprises at its 3′ end SEQ ID NO: 2175, 2180, 2191, 2209, 2223, 2226, 2238, 2256, 2263, 2279, 2295, 2307, 2313, 2324, or 2338. In some embodiments, the editing template has a length of 25 nucleotides or less. In some embodiments, the PBS comprises at its 5′ end a sequence that is a reverse complement of nucleotides 10-13, 9-13, 8-13, 7-13, 6-13, 5-13, 4-13, 3-13, 2-13, or 1-13 of SEQ ID NO: 2128. In some embodiments, the PBS comprises at its 5′ end a sequence corresponding to GCTGGAAC, where “T” is a “U”.

[0013] In some embodiments, the PBS comprises at its 5′ end SEQ ID NO: 2142. In some embodiments, the 3′ end of the editing template is adjacent to the 5′ end of the PBS. In some embodiments, the PEgRNA of any one of aspects above, comprises a pegRNA sequence selected from any one of SEQ ID NOs: 14769, 14770, 14771, 14772, 14773, 14774, 14775, 14776, 14777, 14778, 14779, 14780, 14781, 14782, 14783, 14784, 14785, 14786, 14787, 14788, 14789, 14790, 14791, 14792, 14793, 14794, 14795, 14796, 14797, 14798, or 14799. In some embodiments, the PEgRNA of any one of aspects above, further comprises 3′ mN*mN*mN*N and 5′mN*mN*mN* modifications, where m indicates that the nucleotide contains a 2′-O-Me modification and a * indicates the presence of a phosphorothioate bond.

[0014] In one aspect, the present disclosure provides a prime editing system comprising: (a) the prime editing guide RNA (PEgRNA) of any one of aspects above, or a nucleic acid encoding the PEgRNA; and (b) a nick guide RNA (ngRNA) comprising at its 3′ end nucleotides 5-20 of any one of SEQ ID NOs: 63, 88, 1994, 2000, 2004, 2005, 2006, 2056, 2057, 2058, 2059, 2125, 2126, 2127, 3244, 3245, 3246, 3247, 3248, 3249, 3250, 3251, 3252, 3253, 3254, 3255, 3256, 3257, 3258, 3259, 3260, 3261, 3262, 3263, 3264, 3265, 3266, 3267, 3268, 3269, 3270, 3271, 3272, 3273, 3274, 3275, 3276, 3277, 3278, 3279, 3280, 3281, 3282, 3283, 3284, 3285, 3286, 3287, 3288, 3289, 3290, 3291, 3292, 3293, 3294, 3295, 3296, 3297, 3298, or 3299, and a gRNA core capable of binding to a Cas9 protein, or a nucleic acid encoding the ngRNA.

[0015] In some embodiments, the spacer of the ngRNA is from 15 to 22 nucleotides in length.

[0016] In some embodiments, the spacer of the ngRNA comprises at its 3′ end nucleotides 4-20, 3-20, 2-20, or 1-20 of SEQ ID NO: 63, 88, 1994, 2000, 2004, 2005, 2006, 2056, 2057, 2058, 2059, 2125, 2126, 2127, 3244, 3245, 3246, 3247, 3248, 3249, 3250, 3251, 3252, 3253, 3254, 3255, 3256, 3257, 3258, 3259, 3260, 3261, 3262, 3263, 3264, 3265, 3266, 3267, 3268, 3269, 3270, 3271, 3272, 3273, 3274, 3275, 3276, 3277, 3278, 3279, 3280, 3281, 3282, 3283, 3284, 3285, 3286, 3287, 3288, 3289, 3290, 3291, 3292, 3293, 3294, 3295, 3296, 3297, 3298, or 3299.

[0017] In some embodiments, the spacer of the ngRNA comprises at its 3′ end SEQ ID NO: 63, 88, 1994, 2000, 2004, 2005, 2006, 2056, 2057, 2058, 2059, 2125, 2126, 2127, 3244, 3245, 3246, 3247, 3248, 3249, 3250, 3251, 3252, 3253, 3254, 3255, 3256, 3257, 3258, 3259, 3260, 3261, 3262, 3263, 3264, 3265, 3266, 3267, 3268, 3269, 3270, 3271, 3272, 3273, 3274, 3275, 3276, 3277, 3278, 3279, 3280, 3281, 3282, 3283, 3284, 3285, 3286, 3287, 3288, 3289, 3290, 3291, 3292, 3293, 3294, 3295, 3296, 3297, 3298, or 3299. In some embodiments, the spacer of the ngRNA is 20 nucleotides in length. In some embodiments, the spacer of the ngRNA is SEQ ID NO: 3269, 3279, 1994, 3247, 3249, 3267, 3288, 3299, 3272, or 3258. In some embodiments, the spacer of the ngRNA is SEQ ID NO: 3269 or 3279 and the editing template of the PEgRNA comprises SEQ ID NO: 2162 at its 3′ end. In some embodiments, the spacer of the ngRNA is SEQ ID NO: 1994 and the editing template of the PEgRNA comprises SEQ ID NO: 2162 at its 3′ end.

[0018] In some embodiments, the spacer of the ngRNA is SEQ ID NO: 3247 and the editing template of the PEgRNA comprises SEQ ID NO: 2154 at its 3′ end. In some embodiments, the spacer of the ngRNA is SEQ ID NO: 3249 and the editing template of the PEgRNA comprises SEQ ID NO: 2153 at its 3′ end. In some embodiments, the spacer of the ngRNA is SEQ ID NO: 3267 and the editing template of the PEgRNA comprises SEQ ID NO: 2157 at its 3′ end. In some embodiments, the spacer of the ngRNA is SEQ ID NO: 3288 and the editing template of the PEgRNA comprises SEQ ID NO: 2152 at its 3′ end. In some embodiments, the spacer of the ngRNA is SEQ ID NO: 3299 and the editing template of the PEgRNA comprises SEQ ID NO: 2159 at its 3′ end.

[0019] In some embodiments, the spacer of the ngRNA is SEQ ID NO: 3272 and the editing template of the PEgRNA comprises SEQ ID NO: 2155 at its 3′ end. In some embodiments, the spacer of the ngRNA is SEQ ID NO: 3258 and the editing template of the PEgRNA comprises SEQ ID NO: 2160 at its 3′ end. In some embodiments, the prime editing system of any one of aspects above, further comprises: (c) a prime editor comprising a Cas9 nickase having a nuclease inactivating mutation in the HNH domain, or a nucleic acid encoding the Cas9 nickase, and a reverse transcriptase, or a nucleic acid encoding the reverse transcriptase. In some embodiments, the Cas9 nickase comprises an amino acid sequence having at least 80%, 85%, 90%, 95%, 96%, 97%, 98%, 99%, or 100% identity to SEQ ID NO: 14831. In some embodiments, the reverse transcriptase comprises an amino acid sequence having at least 80%, 85%, 90%, 95%, 96%, 97%, 98%, 99%, or 100% identity to SEQ ID NO: 14828. In some embodiments, the sequence identities are determined by Needleman-Wunsch alignment of two protein sequences with Gap Costs set to Existence: 11 Extension: 1 where percent identity is calculated by dividing the number of identities by the length of the alignment. In some embodiments, the prime editor is a fusion protein.

[0020] In one aspect, the present disclosure provides an LNP comprising the prime editing system of any one of aspects above.

[0021] In some embodiments, the PEgRNA, the nucleic acid encoding the Cas9 nickase, and the nucleic acid encoding the reverse transcriptase. In some embodiments, the nucleic acid encoding the Cas9 nickase and the nucleic acid encoding the reverse transcriptase are mRNA. In some embodiments, the nucleic acid encoding the Cas9 nickase and the nucleic acid encoding the reverse transcriptase are the same molecule. In some embodiments, the LNP of any one of aspects above, further comprises the ngRNA.

[0022] In one aspect, provided herein is a method of correcting for editing an ATP7B gene, the method comprising contacting the ATP7B gene with: (A) the PEgRNA of any one of aspects above and a prime editor comprising a Cas9 nickase having a nuclease inactivating mutation in the HNH domain and a reverse transcriptase, (B) the prime editing system of any one of aspects above, or (C) the LNP of any one of aspects above.

[0023] In some embodiments, the ATP7B gene is in a cell. In some embodiments, the cell is a mammalian cell. In some embodiments, the cell is a human cell. In some embodiments, the cell is a primary cell. In some embodiments, the cell is a hepatocyte. In some embodiments, the cell is in a subject. In some embodiments, the subject is a human. In some embodiments, the cell is from a subject having Wilson's disease. In some embodiments, the method of any one of aspects above, further comprises administering the cell to the subject after incorporation of the intended nucleotide edit.

[0024] In one aspect, the present disclosure provides a cell generated by the method of any one of aspects above.

[0025] In one aspect, provided herein is a population of cells generated by the method of any one of aspects above.

[0026] In one aspect, provided herein is a method for treating Wilson's disease in a subject in need thereof, the method comprising administering to the subject: (a) the PEgRNA of any one of aspects above, (B) the prime editing system of any one of aspects above, or (C) the LNP of any one of aspects above.

[0027] In some embodiments, the method of any one of aspects above, comprises administering to the subject the PEgRNA of any one of aspects above and a prime editor comprising a Cas9 nickase having a nuclease inactivating mutation in the HNH domain and a reverse transcriptase or one or more nucleic acids encoding the prime editor or its components. In some embodiments, the prime editor is a fusion protein.

[0028] In one aspect, provided herein is a prime editing guide RNA (PEgRNA) comprising: (a) a spacer comprising at its 3′ end nucleotides 5-20 of a PEgRNA Spacer sequence selected from any one of Tables 1-84; (b) a gRNA core capable of binding to a Cas9 protein, and (c) an extension arm comprising: (i) an editing template comprising at its 3′ end an RTT sequence selected from the same Table as the PEgRNA Spacer sequence, and (ii) a primer binding site (PBS) comprising at its 5′ end a PBS sequence selected from the same Table as the PEgRNA Spacer sequence.

[0029] In some embodiments, the spacer of the PEgRNA is from 16 to 22 nucleotides in length. In some embodiments, the spacer of the PEgRNA is 20 nucleotides in length. In some embodiments, the PEgRNA of any one of aspects above, comprises from 5′ to 3′, the spacer, the gRNA core, the editing template, and the PBS. In some embodiments, the spacer, the gRNA core, the editing template, and the PBS form a contiguous sequence in a single molecule. In some embodiments, the PEgRNA of any one of aspects above, comprises a pegRNA sequence selected from the same Table as the PEgRNA Spacer sequence.

[0030] In one aspect, provided herein is a prime editing system comprising: (a) the prime editing guide RNA (PEgRNA) of any one of aspects above, or a nucleic acid encoding the PEgRNA; and (b) a nick guide RNA (ngRNA) comprising a spacer comprising at its 3′ end nucleotides 5-20 of any ngRNA Spacer sequence selected from the same Table as the PEgRNA Spacer sequence and a gRNA core capable of binding to a Cas9 protein, or a nucleic acid encoding the ngRNA.

[0031] In some embodiments, the spacer of the ngRNA is from 16 to 22 nucleotides in length. In some embodiments, the spacer of the ngRNA comprises at its 3′ end nucleotides 4-20, 3-20, 2-20, or 1-20 of the ngRNA Spacer sequence selected from the same Table as the PEgRNA Spacer sequence. In some embodiments, the spacer of the ngRNA comprises at its 3′ end the ngRNA Spacer sequence selected from the same Table as the PEgRNA Spacer sequence. In some embodiments, the spacer of the ngRNA is 20 nucleotides in length. In some embodiments, the ngRNA comprises a ngRNA sequence selected from the same Table as the PEgRNA Spacer sequence.

[0032] In some embodiments, the prime editing system of any one of aspects above, further comprises: (c) a prime editor comprising a Cas9 nickase having a nuclease inactivating mutation in the HNH domain, or a nucleic acid encoding the Cas9 nickase, and a reverse transcriptase, or a nucleic acid encoding the reverse transcriptase. In some embodiments, the Cas9 nickase comprises an amino acid sequence having at least 80%, 85%, 90%, 95%, 96%, 97%, 98%, 99%, or 100% identity to SEQ ID NO: 14831. In some embodiments, the reverse transcriptase comprises an amino acid sequence having at least 80%, 85%, 90%, 95%, 96%, 97%, 98%, 99%, or 100% identity to SEQ ID NO: 14828. In some embodiments, the sequence identities are determined by Needleman-Wunsch alignment of two protein sequences with Gap Costs set to Existence: 11 Extension: 1 where percent identity is calculated by dividing the number of identities by the length of the alignment. In some embodiments, the prime editor is a fusion protein.

[0033] In one aspect, provided herein is an LNP comprising the prime editing system of any one of aspects above.

[0034] In some embodiments, the PEgRNA, the nucleic acid encoding the Cas9 nickase, and the nucleic acid encoding the reverse transcriptase. In some embodiments, the nucleic acid encoding the Cas9 nickase and the nucleic acid encoding the reverse transcriptase are mRNA. In some embodiments, the nucleic acid encoding the Cas9 nickase and the nucleic acid encoding the reverse transcriptase are the same molecule. In some embodiments, the LNP of any one of aspects above, further comprises the ngRNA.

[0035] In one aspect, provided herein is a method of correcting for editing an ATP7B gene, the method comprising contacting the ATP7B gene with: (A) the PEgRNA of any one of aspects above and a prime editor comprising a Cas9 nickase having a nuclease inactivating mutation in the HNH domain and a reverse transcriptase, (B) the prime editing system of any one of aspects above, or (C) the LNP of any one of aspects above.

[0036] In some embodiments, the ATP7B gene is in a cell. In some embodiments, the cell is a mammalian cell. In some embodiments, the cell is a human cell. In some embodiments, the cell is a primary cell. In some embodiments, the cell is a hepatocyte. In some embodiments, the cell is in a subject. In some embodiments, the subject is a human. In some embodiments, the cell is from a subject having Wilson's disease. In some embodiments, the method of any one of aspects above, further comprises administering the cell to the subject after incorporation of the intended nucleotide edit.

[0037] In one aspect, provided herein is a cell generated by the method of any one of aspects above.

[0038] In one aspect, provided herein is a population of cells generated by the method of any one of aspects above.

[0039] In one aspect, the present disclosure provides a method for treating Wilson's disease in a subject in need thereof, the method comprising administering to the subject: (a) the PEgRNA of any one of aspects above, (B) the prime editing system of any one of aspects above, or (C) the LNP of any one of aspects above.

[0040] In some embodiments, the method of any one of aspects above, comprises administering to the subject the PEgRNA of any one of aspects above and a prime editor comprising a Cas9 nickase having a nuclease inactivating mutation in the HNH domain and a reverse transcriptase or one or more nucleic acids encoding the prime editor or its components. In some embodiments, the prime editor is a fusion protein. In some embodiments, the PEgRNA of any one of aspects above comprises, (B) the prime editing system of any one of aspects above, or (C) the LNP of any one of aspects above, wherein the PEgRNA Spacer sequence is selected from Table 9, Table 8, or Table 11. In some embodiments, the PEgRNA Spacer sequence is selected from Table 9.

### INCORPORATION BY REFERENCE

[0041] All publications, patents, and patent applications mentioned in this specification are herein incorporated by reference to the same extent as if each individual publication, patent, or patent application was specifically and individually indicated to be incorporated by reference.

### BRIEF DESCRIPTION OF THE DRAWINGS

[0042] The novel features of the disclosure are set forth with particularity in the appended claims. A better understanding of the features and advantages of the present disclosure will be obtained by reference to the following detailed description that sets forth illustrative embodiments, in which the principles of the disclosure are utilized, and the accompanying drawings of which:

[0043] FIG. 1 depicts a schematic of a prime editing guide RNA (PEgRNA) binding to a double stranded target DNA sequence.

[0044] FIG. 2 depicts a PEgRNA architectural overview in an exemplary schematic of PEgRNA designed for a prime editor.

[0045] FIG. 3A depicts a 3′ to 5′ schematic (with the coding strand at the bottom) of an ATP7B R778 locus with spacer sequences and an R778L mutation highlighted. FIG. 3A discloses SEQ ID NOS 14902-14903, respectively, in order of appearance

[0046] FIG. 3B depicts a lentiviral screen design schematic.

[0047] FIG. 4 is a schematic showing the spacer and gRNA core part of an exemplary guide RNA, in two separate molecules. The rest of the PEgRNA structure is not shown.

### DETAILED DESCRIPTION OF THE DISCLOSURE

[0048] Provided herein, in some embodiments, are compositions and methods to edit the target gene ATP7B with prime editing. In certain embodiments, provided herein are compositions and methods for correction of mutations in the copper-transporting ATPase 2 (ATP7B) gene associated with Wilson's Disease. Compositions provided herein can comprise prime editors (PEs) that may use engineered guide polynucleotides, e.g., prime editing guide RNAs (PEgRNAs), that can direct PEs to specific DNA targets and can encode DNA edits on the target gene ATP7B that serve a variety of functions, including direct correction of disease-causing mutations.

[0049] The following description and examples illustrate embodiments of the present disclosure in detail. It is to be understood that this disclosure is not limited to the particular embodiments described herein and as such can vary. Those of skill in the art will recognize that there are numerous variations and modifications of this disclosure, which are encompassed within its scope. Although various features of the present disclosure can be described in the context of a single embodiment, the features can also be provided separately or in any suitable combination. Conversely, although the present disclosure can be described herein in the context of separate embodiments for clarity, the present disclosure can also be implemented in a single embodiment.

### Definitions

[0050] Unless defined otherwise, all technical and scientific terms used herein have the same meaning as is commonly understood by one of ordinary skill in the art.

[0051] The terminology used herein is for the purpose of describing particular embodiments only and is not intended to be limiting. As used herein, the singular forms “a”, “an” and “the” are intended to include the plural forms as well, unless the context clearly indicates otherwise. Furthermore, to the extent that the terms “including”, “includes”, “having”, “has”, “with”, or variants thereof as used herein mean “comprising”.

[0052] Unless otherwise specified, the words “comprising”, “comprise”, “comprises”, “having”, “have”, “has”, “including”, “includes”, “include”, “containing”, “contains” and “contain” are inclusive or open-ended and do not exclude additional, unrecited elements or method steps.

[0053] Reference to “some embodiments”, “an embodiment”, “one embodiment”, or “other embodiments” means that a particular feature or characteristic described in connection with the embodiments is included in at least one or more embodiments, but not necessarily all embodiments, of the present disclosure.

[0054] The term “about” or “approximately” means within an acceptable error range for the particular value as determined by one of ordinary skill in the art, which will depend in part on how the value is measured or determined, i.e, the limitations of the measurement system. For example, “about” can mean within 1 standard deviation, per the practice in the art. Alternatively, “about” can mean a range of up to 20%, up to 10%, up to 5%, or up to 1% of a given value. Alternatively, particularly with respect to biological systems or processes, the term can mean within an order of magnitude, preferably within 5-fold, and more preferably within 2-fold, of a value. Where particular values are described in the application and claims, unless otherwise stated, the term “about” meaning within an acceptable error range for the particular value should be assumed.

[0055] As used herein, a “cell” can generally refer to a biological cell. A cell can be the basic structural, functional and/or biological unit of a living organism. A cell can originate from any organism having one or more cells. Some non-limiting examples include: a prokaryotic cell, eukaryotic cell, a bacterial cell, an archaeal cell, a cell of a single-cell eukaryotic organism, a protozoa cell, a cell from a plant, an animal cell, a cell from an invertebrate animal (e.g. fruit fly, cnidarian, echinoderm, nematode, etc.), a cell from a vertebrate animal (e.g., fish, amphibian, reptile, bird, mammal), a cell from a mammal (e.g., a pig, a cow, a goat, a sheep, a rodent, a rat, a mouse, a non-human primate, a human, etc.), et cetera. Sometimes a cell may not originate from a natural organism (e.g., a cell can be synthetically made, sometimes termed an artificial cell).

[0056] In some embodiments, the cell is a human cell. A cell can be of or derived from different tissues, organs, and/or cell types. In some embodiments, the cell is a primary cell. As used herein, the term “primary cell” means a cell isolated from an organism, e.g., a mammal, which is grown in tissue culture (i.e., in vitro) for the first time before subdivision and transfer to a subculture. In some embodiments, the cell is a stem cell. In some non-limiting examples, mammalian cells, including primary cells and stem cells, can be modified through introduction of one or more polynucleotides, polypeptide, and/or prime editing compositions (e.g., through transfection, transduction, electroporation, and the like) and further passaged. Such modified cells include hepatocytes, fibroblasts, keratinocytes, epithelial cells (e.g., mammary epithelial cells, intestinal epithelial cells), endothelial cells, glial cells, neural cells, formed elements of the blood (e.g., lymphocytes, bone marrow cells), muscle cells and precursors of these somatic cell types. In some embodiments, the cell is a primary hepatocyte. In some embodiments, the cell is a primary human hepatocyte. In some embodiments, the cell is a primary human hepatocyte derived from an induced human pluripotent stem cell (iPSC). In some embodiments, the cell is a neuron. In some embodiments, the cell is a neuron from basal ganglia. In some embodiments, the cell is a neuron from basal ganglia of a subject. In some embodiments, the cell is a stem cell. In some embodiments, the cell is a progenitor cell. In some embodiments, the cell is a pluripotent cell (e.g., a pluripotent stem cell) In some embodiments, the cell (e.g., a stem cell) is an embryonic stem cell, tissue-specific stem cell, mesenchymal stem cell, or an induced pluripotent stem cell. In some embodiments, the cell is an induced pluripotent stem cell (iPSC). In some embodiments, the cell is an embryonic stem cell (ESC). In some embodiments, the cell is a primary hepatocyte. In some embodiments, the cell is a primary human hepatocyte. In some embodiments, the cell is a primary human hepatocyte derived from an induced human pluripotent stem cell (iPSC). In some embodiments, the cell is a neuron. In some embodiments, the cell is a neuron from basal ganglia. In some embodiments, the cell is a neuron from basal ganglia of a subject.

[0057] In some embodiments, the cell comprises a prime editor, a PEgRNA, or a prime editing composition disclosed herein. In some embodiments, the cell further comprises an ngRNA. In some embodiments, the cell is from a human subject. In some embodiments, the human subject has a disease or condition, or is at a risk of developing a disease or a condition associated with a mutation to be corrected by prime editing, for example, Wilsons's disease. In some embodiments, the cell is from a human subject, and comprises a prime editor, a PEgRNA, or a prime editing composition for correction of the mutation. In some embodiments, the cell is from the human subject and the mutation has been edited or corrected by prime editing.

[0058] The term “substantially” as used herein may refer to a value approaching 100% of a given value. In some embodiments, the term may refer to an amount that may be at least about 70%, 80%, 90%, 91%, 92%, 93%, 94%, 95%, 96%, 97%, 98%, 99%, 99.9%, or 99.99% of a total amount. In some embodiments, the term may refer to an amount that may be about 100% of a total amount.

[0059] The terms “protein” and “polypeptide” can be used interchangeably to refer to a polymer of two or more amino acids joined by covalent bonds (e.g., an amide bond) that can adopt a three-dimensional conformation. In some embodiments, a protein or polypeptide comprises at least 10 amino acids, 15 amino acids, 20 amino acids, 30 amino acids or 50 amino acids joined by covalent bonds (e.g., amide bonds). In some embodiments, a protein comprises at least two amide bonds. In some embodiments, a protein comprises multiple amide bonds. In some embodiments, a protein comprises an enzyme, enzyme precursor proteins, regulatory protein, structural protein, receptor, nucleic acid binding protein, a biomarker, a member of a specific binding pair (e.g., a ligand or aptamer), or an antibody. In some embodiments, a protein may be a full-length protein (e.g., a fully processed protein having certain biological function). In some embodiments, a protein may be a variant or a fragment of a full-length protein. For example, in some embodiments, a Cas9 protein domain comprises an H840A amino acid substitution compared to a naturally occurring S. pyogenes Cas9 protein. A variant of a protein or enzyme, for example a variant reverse transcriptase, comprises a polypeptide having an amino acid sequence that is about 60% identical, about 70% identical, about 80% identical, about 90% identical, about 95% identical, about 96% identical, about 97% identical, about 98% identical, about 99% identical, about 99.5% identical, or about 99.9% identical to the amino acid sequence of a reference protein.

[0060] In some embodiments, a protein comprises one or more protein domains or subdomains. As used herein, the term “polypeptide domain”, “protein domain”, or “domain” when used in the context of a protein or polypeptide, refers to a polypeptide chain that has one or more biological functions, e.g., a catalytic function, a protein-protein binding function, or a protein-DNA function. In some embodiments, a protein comprises multiple protein domains. In some embodiments, a protein comprises multiple protein domains that are naturally occurring. In some embodiments, a protein comprises multiple protein domains from different naturally occurring proteins. For example, in some embodiments, a prime editor may be a fusion protein comprising a Cas9 protein domain of S. pyogenes and a reverse transcriptase protein domain of a retrovirus (e.g., a Moloney murine leukemia virus) or a variant of the retrovirus. A protein that comprises amino acid sequences from different origins or naturally occurring proteins may be referred to as a fusion, or chimeric protein.

[0061] In some embodiments, a protein comprises a functional variant or functional fragment of a full-length wild type protein. A “functional fragment” or “functional portion”, as used herein, refers to any portion of a reference protein (e.g., a wild type protein) that encompasses less than the entire amino acid sequence of the reference protein while retaining one or more of the functions, e.g., catalytic or binding functions. For example, a functional fragment of a reverse transcriptase may encompass less than the entire amino acid sequence of a wild type reverse transcriptase but retains the ability under at least one set of conditions to catalyze the polymerization of a polynucleotide. When the reference protein is a fusion of multiple functional domains, a functional fragment thereof may retain one or more of the functions of at least one of the functional domains. For example, a functional fragment of a Cas9 may encompass less than the entire amino acid sequence of a wild type Cas9 but retains its DNA binding ability and lacks its nuclease activity partially or completely.

[0062] A “functional variant” or “functional mutant”, as used herein, refers to any variant or mutant of a reference protein (e.g., a wild type protein) that encompasses one or more alterations to the amino acid sequence of the reference protein while retaining one or more of the functions, e.g., catalytic or binding functions. In some embodiments, the one or more alterations to the amino acid sequence comprises amino acid substitutions, insertions or deletions, or any combination thereof. In some embodiments, the one or more alterations to the amino acid sequence comprises amino acid substitutions. For example, a functional variant of a reverse transcriptase may comprise one or more amino acid substitutions compared to the amino acid sequence of a wild type reverse transcriptase but retains the ability under at least one set of conditions to catalyze the polymerization of a polynucleotide. When the reference protein is a fusion of multiple functional domains, a functional variant thereof may retain one or more of the functions of at least one of the functional domains. For example, in some embodiments, a functional fragment of a Cas9 may comprise one or more amino acid substitutions in a nuclease domain, e.g., an H840A amino acid substitution, compared to the amino acid sequence of a wild type Cas9, but retains the DNA binding ability and lacks the nuclease activity partially or completely.

[0063] The term “function” and its grammatical equivalents as used herein may refer to a capability of operating, having, or serving an intended purpose. Functional may comprise any percent from baseline to 100% of an intended purpose. For example, functional may comprise or comprise about 5%, 10%, 15%, 20%, 25%, 30%, 35%, 40%, 45%, 50%, 55%, 60%, 65%, 70%, 75%, 80%, 85%, 90%, 95%, or up to about 100% of an intended purpose. In some embodiments, the term functional may mean over or over about 100% of normal function, for example, 125%, 150%, 175%, 200%, 250%, 300%, 400%, 500%, 600%, 700% or up to about 1000% of an intended purpose.

[0064] In some embodiments, a protein or polypeptides includes naturally occurring amino acids (e.g., one of the twenty amino acids commonly found in peptides synthesized in nature, and known by the one letter abbreviations A, R, N, C, D, Q, E, G, H, I, L, K, M, F, P, S, T, W, Y and V). In some embodiments, a protein or polypeptides includes non-naturally occurring amino acids (e.g., amino acids which is not one of the twenty amino acids commonly found in peptides synthesized in nature, including synthetic amino acids, amino acid analogs, and amino acid mimetics). In some embodiments, a protein or polypeptide is modified.

[0065] In some embodiments, a protein comprises an isolated polypeptide. The term “isolated” means free or removed to varying degrees from components which normally accompany it as found in the natural state or environment. For example, a polypeptide naturally present in a living animal is not isolated, and the same polypeptide partially or completely separated from the coexisting materials of its natural state is isolated.

[0066] In some embodiments, a protein is present within a cell, a tissue, an organ, or a virus particle. In some embodiments, a protein is present within a cell or a part of a cell (e.g., a bacteria cell, a plant cell, or an animal cell). In some embodiments, the cell is in a tissue, in a subject, or in a cell culture. In some embodiments, the cell is a microorganism (e.g., a bacterium, fungus, protozoan, or virus). In some embodiments, a protein is present in a mixture of analytes (e.g., a lysate). In some embodiments, the protein is present in a lysate from a plurality of cells or from a lysate of a single cell.

[0067] The terms “homologous,” “homology,” or “percent homology” as used herein refer to the degree of sequence identity between an amino acid and a corresponding reference amino acid sequence, or a polynucleotide sequence and a corresponding reference polynucleotide sequence. “Homology” can refer to polymeric sequences, e.g., polypeptide or DNA sequences that are similar. Homology can mean, for example, nucleic acid sequences with at least about: 50%, 55%, 60%, 65%, 70%, 75%, 80%, 81%, 82%, 83%, 84%, 85%, 86%, 87%, 88%, 89%, 90%, 91%, 92%, 93%, 94%, 95%, 96%, 97%, 98%, 99%, or 100% identity. In other embodiments, a “homologous sequence” of nucleic acid sequences may exhibit 93%, 95% or 98% sequence identity to the reference nucleic acid sequence. For example, a “region of homology to a genomic region” can be a region of DNA that has a similar sequence to a given genomic region in the genome. A region of homology can be of any length that is sufficient to promote binding of a spacer, a primer binding site, or a protospacer sequence to the genomic region. For example, the region of homology can comprise at least 5, 10, 11, 12, 13, 14, 15, 16, 17, 18, 19, 20, 21, 22, 23, 24, 25, 30, 35, 40, 45, 50, 55, 60, 65, 70, 75, 80, 85, 90, 95, 100, 200, 300, 400, 500, 600, 700, 800, 900, 1000, 1100, 1200, 1300, 1400, 1500, 1600, 1700, 1800, 1900, 2000, 2100, 2200, 2300, 2400, 2500, 2600, 2700, 2800, 2900, 3000, 3100 or more bases in length such that the region of homology has sufficient homology to undergo binding with the corresponding genomic region.

[0068] When a percentage of sequence homology or identity is specified, in the context of two nucleic acid sequences or two polypeptide sequences, the percentage of homology or identity generally refers to the alignment of two or more sequences across a portion of their length when compared and aligned for maximum correspondence. When a position in the compared sequence can be occupied by the same base or amino acid, then the molecules can be homologous at that position. Unless stated otherwise, sequence homology or identity is assessed over the specified length of the nucleic acid, polypeptide or portion thereof. In some embodiments, the homology or identity is assessed over a functional portion or specified portion of the length.

[0069] Alignment of sequences for assessment of sequence homology can be conducted by algorithms known in the art, such as the Basic Local Alignment Search Tool (BLAST) algorithm, which is described in Altschul et al, J. Mol. Biol. 215:403-410, 1990. A publicly available, internet interface, for performing BLAST analyses is accessible through the National Center for Biotechnology Information. Additional known algorithms include those published in: Smith & Waterman, “Comparison of Biosequences”, Adv. Appl. Math. 2:482, 1981; Needleman & Wunsch, “A general method applicable to the search for similarities in the amino acid sequence of two proteins” J. Mol. Biol. 48:443, 1970; Pearson & Lipman “Improved tools for biological sequence comparison”, Proc. Natl. Acad. Sci. USA 85:2444, 1988; or by automated implementation of these or similar algorithms. Global alignment programs may also be used to align similar sequences of roughly equal size. Examples of global alignment programs include NEEDLE (available at www.ebi.ac.uk/Tools/psa/emboss_needle/) which is part of the EMBOSS package (Rice P et al., Trends Genet., 2000; 16: 276-277), and the GGSEARCH program https://fasta.bioch.virginia.edu/fasta_www2/, which is part of the FASTA package (Pearson W and Lipman D, 1988, Proc. Natl. Acad. Sci. USA, 85: 2444-2448). Both of these programs are based on the Needleman-Wunsch algorithm which is used to find the optimum alignment (including gaps) of two sequences along their entire length. A detailed discussion of sequence analysis can also be found in Unit 19.3 of Ausubel et al (“Current Protocols in Molecular Biology” John Wiley & Sons Inc, 1994-1998, Chapter 15, 1998). In some embodiments, alignment between a query sequence and a reference sequence is performed with Needleman-Wunsch alignment with Gap Costs set to Existence: 11 Extension: 1 where percent identity is calculated by dividing the number of identities by the length of the alignment, as further described in Altschul et al. (“Gapped BLAST and PSI-BLAST: a new generation of protein database search programs”, Nucleic Acids Res. 25:3389-3402, 1997) and Altschul et al, (“Protein database searches using compositionally adjusted substitution matrices”, FEBS J. 272:5101-5109, 2005).

[0070] A skilled person understands that amino acid (or nucleotide) positions may be determined in homologous sequences based on alignment, for example, “H840” in a reference Cas9 sequence may correspond to H839, or another position in a Cas9 homolog.

[0071] The term “polynucleotide” or “nucleic acid molecule” can be any polymeric form of nucleotides, including DNA, RNA, a hybridization thereof, or RNA-DNA chimeric molecules. In some embodiments, a polynucleotide comprises cDNA, genomic DNA, mRNA, tRNA, rRNA, or microRNA. In some embodiments, a polynucleotide is double stranded, e.g., a double-stranded DNA in a gene. In some embodiments, a polynucleotide is single-stranded or substantially single-stranded, e.g., single-stranded DNA or an mRNA. In some embodiments, a polynucleotide is a cell-free nucleic acid molecule. In some embodiments, a polynucleotide circulates in blood. In some embodiments, a polynucleotide is a cellular nucleic acid molecule. In some embodiments, a polynucleotide is a cellular nucleic acid molecule in a cell circulating in blood.

[0072] Polynucleotides can have any three-dimensional structure. The following are nonlimiting examples of polynucleotides: a gene or gene fragment (for example, a probe, primer, EST or SAGE tag), an exon, an intron, intergenic DNA (including, without limitation, heterochromatic DNA), messenger RNA (mRNA), transfer RNA (tRNA), ribosomal RNA (rRNA), a ribozyme, cDNA, a recombinant polynucleotide, a branched polynucleotide, a plasmid, a vector, isolated DNA, isolated RNA, sgRNA, guide RNA, a nucleic acid probe, a primer, an snRNA, a long non-coding RNA, a snoRNA, a siRNA, a miRNA, a tRNA-derived small RNA (tsRNA), an antisense RNA, an shRNA, or a small rDNA-derived RNA (srRNA).

[0073] In some embodiments, a polynucleotide comprises deoxyribonucleotides, ribonucleotides or analogs thereof. In some embodiments, a polynucleotide comprises modified nucleotides, such as methylated nucleotides and nucleotide analogs. If present, modifications to the nucleotide structure can be imparted before or after assembly of the polynucleotide. The sequence of nucleotides can be interrupted by non-nucleotide components. A polynucleotide can be further modified after polymerization, such as by conjugation with a labeling component.

[0074] In some embodiments, a polynucleotide is composed of a specific sequence of four nucleotide bases: adenine (A); cytosine (C); guanine (G); thymine (T); and uracil (U) for thymine when the polynucleotide is RNA. In some embodiments, the polynucleotide may comprise one or more other nucleotide bases, such as inosine (I), which is read by the translation machinery as guanine (G).

[0075] In some embodiments, a polynucleotide may be modified. As used herein, the terms “modified” or “modification” refers to chemical modification with respect to the A, C, G, T and U nucleotides. In some embodiments, modifications may be on the nucleoside base and/or sugar portion of the nucleosides that comprise the polynucleotide. In some embodiments, the modification may be on the internucleoside linkage (e.g., phosphate backbone). In some embodiments, multiple modifications are included in the modified nucleic acid molecule. In some embodiments, a single modification is included in the modified nucleic acid molecule.

[0076] The term “complement”, “complementary”, or “complementarity” as used herein, refers to the ability of two polynucleotide molecules to base pair with each other. Complementary polynucleotides may base pair via hydrogen bonding, which may be Watson Crick, Hoogsteen or reversed Hoogsteen hydrogen bonding. For example, an adenine on one polynucleotide molecule will base pair to a thymine or uracil on a second polynucleotide molecule and a cytosine on one polynucleotide molecule will base pair to a guanine on a second polynucleotide molecule. Two polynucleotide molecules are complementary to each other when a first polynucleotide molecule comprising a first nucleotide sequence can base pair with a second polynucleotide molecule comprising a second nucleotide sequence. For instance, the two DNA molecules 5′-ATGC-3′ and 5′-GCAT-3′ are complementary, and the complement of the DNA molecule 5′-ATGC-3′ is 5′-GCAT-3′. A percentage of complementarity indicates the percentage of nucleotides in a polynucleotide molecule which can base pair with a second polynucleotide molecule (e.g., 5, 6, 7, 8, 9, 10 out of 10 being 50%, 60%, 70%, 80%, 90%, and 100% complementary, respectively). “Perfectly complementary” means that all the contiguous nucleotides of a polynucleotide molecule will base pair with the same number of contiguous nucleotides in a second polynucleotide molecule. “Substantially complementary” as used herein refers to a degree of complementarity that can be 70%, 75%, 80%, 85%, 90%, 95%, 97%, 98%, or 99% over all or a portion of two polynucleotide molecules. In some embodiments, the portion of complementarity may be a region of 10, 15, 20, 25, 30, 35, 40, 45, 50, or more nucleotides. “Substantial complementary” can also refer to a 100% complementarity over a portion or region of two polynucleotide molecules. In some embodiments, the portion or region of complementarity between the two polynucleotide molecules is at least 60%, 65%, 70%, 75%, 80%, 85%, 90%, 95%, 97%, 98%, or 99% of the length of at least one of the two polynucleotide molecules or a functional or defined portion thereof.

[0077] As used herein, “expression” refers to the process by which polynucleotides are transcribed into mRNA and/or the process by which polynucleotides, e.g., the transcribed mRNA translated into peptides, polypeptides, or proteins. If the polynucleotide is derived from genomic DNA, expression may include splicing of the mRNA in a eukaryotic cell. In some embodiments, expression of a polynucleotide, e.g., a gene or a DNA encoding a protein, is determined by the amount of the protein encoded by the gene after transcription and translation of the gene. In some embodiments, expression of a polynucleotide, e.g., a gene or a DNA encoding a protein, is determined by the amount of a functional form of the protein encoded by the gene after transcription and translation of the gene. In some embodiments, expression of a gene is determined by the amount of the mRNA, or transcript, that is encoded by the gene after transcription the gene. In some embodiments, expression of a polynucleotide, e.g., an mRNA, is determined by the amount of the protein encoded by the mRNA after translation of the mRNA. In some embodiments, expression of a polynucleotide, e.g., a mRNA or coding RNA, is determined by the amount of a functional form of the protein encoded by the polypeptide after translation of the polynucleotide.

[0078] The term “sequencing” as used herein, may comprise capillary sequencing, bisulfite-free sequencing, bisulfite sequencing, TET-assisted bisulfite (TAB) sequencing, ACE-sequencing, high-throughput sequencing, Maxam-Gilbert sequencing, massively parallel signature sequencing, Polony sequencing, 454 pyrosequencing, Sanger sequencing, Illumina sequencing, SOLiD sequencing, Ion Torrent semiconductor sequencing, DNA nanoball sequencing, Heliscope single molecule sequencing, single molecule real time (SMRT) sequencing, nanopore sequencing, shot gun sequencing, RNA sequencing, or any combination thereof.

[0079] The terms “equivalent” or “biological equivalent” are used interchangeably when referring to a particular molecule, or biological or cellular material, and means a molecule having minimal homology to another molecule while still maintaining a desired structure or functionality.

[0080] The term “encode” as it is applied to polynucleotides refers to a polynucleotide which is said to “encode” another polynucleotide, a polypeptide, or an amino acid if, in its native state or when manipulated by methods well known to those skilled in the art, it can be used as polynucleotide synthesis template, e.g., transcribed into an RNA, reverse transcribed into a DNA or cDNA, and/or translated to produce an amino acid, or a polypeptide or fragment thereof. In some embodiments, a polynucleotide comprising three contiguous nucleotides form a codon that encodes a specific amino acid. In some embodiments, a polynucleotide comprises one or more codons that encode a polypeptide. In some embodiments, a polynucleotide comprising one or more codons comprises a mutation in a codon compared to a wild-type reference polynucleotide. In some embodiments, the mutation in the codon encodes an amino acid substitution in a polypeptide encoded by the polynucleotide as compared to a wild-type reference polypeptide.

[0081] The term “mutation” as used herein refers to a change and/or alteration in an amino acid sequence of a protein or nucleic acid sequence of a polynucleotide. Such changes and/or alterations may comprise the substitution, insertion, deletion and/or truncation of one or more amino acids, in the case of an amino acid sequence, and/or nucleotides, in the case of nucleic acid sequence, compared to a reference amino acid or a reference nucleic acid sequence. In some embodiments, the reference sequence is a wild-type sequence. In some embodiments, a mutation in a nucleic acid sequence of a polynucleotide encodes a mutation in the amino acid sequence of a polypeptide. In some embodiments, the mutation in the amino acid sequence of the polypeptide or the mutation in the nucleic acid sequence of the polynucleotide is a mutation associated with a disease state.

[0082] The term “subject” and its grammatical equivalents as used herein may refer to a human or a non-human. A subject may be a mammal. A human subject may be male or female. A human subject may be of any age. A subject may be a human embryo. A human subject may be a newborn, an infant, a child, an adolescent, or an adult. A human subject may be up to about 100 years of age. A human subject may be in need of treatment for a genetic disease or disorder.

[0083] The terms “treatment” or “treating” and their grammatical equivalents may refer to the medical management of a subject with an intent to cure, ameliorate, or ameliorate a symptom of, a disease, condition, or disorder. Treatment may include active treatment, that is, treatment directed specifically toward the improvement of a disease, condition, or disorder. Treatment may include causal treatment, that is, treatment directed toward removal of the cause of the associated disease, condition, or disorder. In addition, this treatment may include palliative treatment, that is, treatment designed for the relief of symptoms rather than the curing of the disease, condition, or disorder. Treatment may include supportive treatment, that is, treatment employed to supplement another specific therapy directed toward the improvement of the disease, condition, or disorder. In some embodiments, a condition may be pathological. In some embodiments, a treatment may not completely cure or prevent a disease, condition, or disorder. In some embodiments, a treatment ameliorates, but does not completely cure or prevent a disease, condition, or disorder. In some embodiments, a subject may be treated for 12 hours, 24 hours, 2 days, 3 days, 4 days, 5 days, 6 days, 7 days, 2 weeks, 3 weeks, 4 weeks, 2 months, 3 months, 4 months, 5 months, 6 months, 1 year, 2 years, 3 years, 4 years, 5 years, 6 years, indefinitely, or life of the subject.

[0084] The term “ameliorate” and its grammatical equivalents means to decrease, suppress, attenuate, diminish, arrest, or stabilize the development or progression of a disease.

[0085] The terms “prevent” or “preventing” means delaying, forestalling, or avoiding the onset or development of a disease, condition, or disorder for a period of time. Prevent also means reducing risk of developing a disease, disorder, or condition. Prevention includes minimizing or partially or completely inhibiting the development of a disease, condition, or disorder. In some embodiments, a composition, e.g. a pharmaceutical composition, prevents a disorder by delaying the onset of the disorder for 12 hours, 24 hours, 2 days, 3 days, 4 days, 5 days, 6 days, 7 days, 2 weeks, 3 weeks, 4 weeks, 2 months, 3 months, 4 months, 5 months, 6 months, 1 year, 2 years, 3 years, 4 years, 5 years, 6 years, indefinitely, or life of a subject.

[0086] The term “effective amount” or “therapeutically effective amount” refers to a quantity of a composition, for example a prime editing composition comprising a construct, that can be sufficient to result in a desired activity upon introduction into a subject as disclosed herein. An effective amount of the prime editing compositions can be provided to the target gene or cell, whether the cell is ex vivo or in vivo. An effective amount can be the amount to induce, for example, at least about a 2-fold change (increase or decrease) or more in the amount of target nucleic acid modulation (e.g., expression of ATP7B gene to produce functional ATP7B protein) observed relative to a negative control. An effective amount or dose can induce, for example, about 2-fold increase, about 3-fold increase, about 4-fold increase, about 5-fold increase, about 6-fold increase, about 7-fold increase, about 8-fold increase, about 9-fold increase, about 10-fold increase, about 25-fold increase, about 50-fold increase, about 100-fold increase, about 200-fold increase, about 500-fold increase, about 700-fold increase, about 1000-fold increase, about 5000-fold increase, or about 10,000-fold increase in target gene modulation (e.g., expression of a target ATP7B gene to produce functional ATP7B protein). The amount of target gene modulation may be measured by any suitable method known in the art. In some embodiments, the “effective amount” or “therapeutically effective amount” is the amount of a composition that is required to ameliorate the symptoms of a disease relative to an untreated patient. In some embodiments, an effective amount is the amount of a composition sufficient to introduce an alteration in a gene of interest in a cell (e.g., a cell in vitro or in vivo).

[0087] An effective amount can be an amount to induce, when administered to a population of cells, a certain percentage of the population of cells to have a correction of a mutation. For example, in some embodiments, an effective amount can be the amount to induce, when administered to or introduced to a population of cells, installation of one or more intended nucleotide edits that correct a mutation in the target ATP7B gene, in at least about 1%, 2%, 5%, about 10%, about 15%, about 20%, about 25%, about 30%, about 35%, about 40%, about 45%, about 50%, about 55%, about 60%, about 65%, about 70%, about 75%, about 80%, about 85%, about 90%, about 95%, or about 99% of the population of cells.

[0088] As used herein, the terms “Wilson's disease.” “Wilsons disease.” and “Wilson disease” are used interchangeably. Wilson's disease is a monogenic autosomal-recessive disorder caused by pathogenic variants in ATP7B that decrease ATP7B function in hepatocytes and reduce excretion of excess copper into bile, leading to systemic copper buildup, hepatic and neural toxicity, and early demise. In some embodiments, mutations in the ATP7B gene are associated with diseases including Wilson's disease. The ATP7B gene codes for a copper transporter expressed in hepatic and neural tissues. The gene product is synthesized in the endoplasmic reticulum, then relocated to the trans Golgi network (TGN) within hepatocytes. ATP7B is most highly expressed in the liver, but is also found in the kidney, placenta, mammary glands, brain, and lung. Alternate names for ATP7B include: ATPase Copper Transporting Beta, Copper-Transporting ATPase, Copper Pump. ATPase, Cu++ Transporting, Beta Polypeptide, Wilson Disease-Associated Protein, PWD, WC1, WND. ATPase, Cu++ Transporting. Beta Polypeptide (Wilson Disease) 2. ATPase, Cu(2+)-Transporting. Beta Polypeptide, Copper-Transporting Protein ATP7B, Wilson Disease. EC 3.6.3.4, EC 7.2.2.8, EC 3.6.3. WD. In the human genome the ATP7B gene is located on 13q14.3 and contains 20 introns and 21 exons, for a total genomic length of 80 kb (chr13:51,930,436-52,012,130 (GRCh38/hg38)).

[0089] More than 600 pathogenic variants in ATP7B have been identified, with single-nucleotide missense and nonsense mutations being the most common, followed by insertions, deletions, and splice site mutations. Individuals with the arginine to leucine substitution at amino acid 778 (p.R778L) (caused by c.2333G>T) in ATP7B have been shown to have an earlier onset of disease and predominantly hepatic presentation (See Wu Z-Y, Lin M T, Murong S X, et al. Molecular diagnosis and prophylactic therapy for presymptomatic Chinese patients with Wilson disease. Arch Neurol. 2003; 60(5):737-741). Geographically, the p.Arg778Leu mutation has been reported to be the most common mutation in Far East Asian countries. The p.R778L mutation has a population allelic frequency of about 10-40% (e.g., about 38% among Korean patients with Wilson's Disease; see Kim E K, Yoo O J, Song K Y, et al. Identification of three novel mutations and a high frequency of the Arg778Leu mutation in Korean patients with Wilson disease. Hum Mutat. 1998; 11(4):275-278.) The p.R778L mutation has been shown to affect mutation affects transmembrane transport of copper. See Dmitriev O Y, Bhattacharjee A, Nokhrin S, et al.

### Prime Editing

[0090] The term “prime editing” refers to programmable editing of a target DNA using a prime editor complexed with a PEgRNA to incorporate an intended nucleotide edit (also referred to herein as a nucleotide change) into the target DNA through target-primed DNA synthesis. A target gene of prime editing may comprise a double stranded DNA molecule having two complementary strands: a first strand that may be referred to as a “target strand” or a “non-edit strand”, and a second strand that may be referred to as a “non-target strand,” or an “edit strand.” In some embodiments, in a prime editing guide RNA (PEgRNA), a spacer sequence is complementary or substantially complementary to a specific sequence on the target strand, which may be referred to as a “search target sequence”. In some embodiments, the spacer sequence anneals with the target strand at the search target sequence. The target strand may also be referred to as the “non-Protospacer Adjacent Motif (non-PAM strand).” In some embodiments, the non-target strand may also be referred to as the “PAM strand”. In some embodiments, the PAM strand comprises a protospacer sequence and optionally a protospacer adjacent motif (PAM) sequence. In prime editing using a Cas-protein-based prime editor, a PAM sequence refers to a short DNA sequence immediately adjacent to the protospacer sequence on the PAM strand of the target gene. A PAM sequence may be specifically recognized by a programmable DNA binding protein, e.g., a Cas nickase or a Cas nuclease. In some embodiments, a specific PAM is characteristic of a specific programmable DNA binding protein, e.g., a Cas nickase or a Cas nuclease. A protospacer sequence refers to a specific sequence in the PAM strand of the target gene that is complementary to the search target sequence. In a PEgRNA, a spacer sequence may have a substantially identical sequence as the protospacer sequence on the edit strand of a target gene, except that the spacer sequence may comprise Uracil (U) and the protospacer sequence may comprise Thymine (T).

[0091] In some embodiments, the double stranded target DNA comprises a nick site on the PAM strand (or non-target strand). As used herein, a “nick site” refers to a specific position in between two nucleotides or two base pairs of the double stranded target DNA. In some embodiments, the position of a nick site is determined relative to the position of a specific PAM sequence. In some embodiments, the nick site is the particular position where a nick will occur when the double stranded target DNA is contacted with a nickase, for example, a Cas nickase, that recognizes a specific PAM sequence. In some embodiments, the nick site is upstream of a specific PAM sequence on the PAM strand of the double stranded target DNA. In some embodiments, the nick site is downstream of a specific PAM sequence on the PAM strand of the double stranded target DNA. In some embodiments, the nick site is upstream of a PAM sequence recognized by a Cas9 nickase, wherein the Cas9 nickase comprises a nuclease active RuvC domain and a nuclease inactive HNH domain. In some embodiments, the nick site is 3 nucleotides upstream of the PAM sequence, and the PAM sequence is recognized by a Streptococcus pyogenes Cas9 nickase, a P. lavamentivorans Cas9 nickase, a C. diphtheriae Cas9 nickase, a N. cinerea Cas9, a S. aureus Cas9, or a N. lari Cas9 nickase.

[0092] In some embodiments, the nick site is 3 base pairs upstream of the PAM sequence, and the PAM sequence is recognized by a Cas9 nickase, wherein the Cas9 nickase that comprises a nuclease active HNH domain and a nuclease inactive RuvC domain. In some embodiments, the nick site is 2 nucleotides upstream of the PAM sequence, and the PAM sequence is recognized by a S. thermophilus Cas9 nickase that comprises a nuclease active RuvC domain and a nuclease inactive HNH domain.

[0093] A “primer binding site” (PBS or primer binding site sequence) is a single-stranded portion of the PEgRNA that comprises a region of complementarity to the PAM strand (i.e., the non-target strand or the edit strand). The PBS is complementary or substantially complementary to a sequence on the PAM strand of the double stranded target DNA that is immediately upstream of the nick site. In some embodiments, in the process of prime editing, the PEgRNA complexes with and directs a prime editor to bind the search target sequence on the target strand of the double stranded target DNA and generates a nick at the nick site on the non-target strand of the double stranded target DNA. In some embodiments, the PBS is complementary to or substantially complementary to, and can anneal to, a free 3′ end on the non-target strand of the double stranded target DNA at the nick site. In some embodiments, the PBS annealed to the free 3′ end on the non-target strand can initiate target-primed DNA synthesis.

[0094] An “editing template” of a PEgRNA is a single-stranded portion of the PEgRNA that is 5′ of the PBS and comprises a region of complementarity to the PAM strand (i.e., the non-target strand or the edit strand), and comprises one or more intended nucleotide edits compared to the endogenous sequence of the double stranded target DNA. In some embodiments, the editing template and the PBS are immediately adjacent to each other. Accordingly, in some embodiments, a PEgRNA in prime editing comprises a single-stranded portion that comprises the PBS and the editing template immediately adjacent to each other. In some embodiments, the single stranded portion of the PEgRNA comprising both the PBS and the editing template is complementary or substantially complementary to an endogenous sequence on the PAM strand (i.e., the non-target strand or the edit strand) of the double stranded target DNA except for one or more non-complementary nucleotides at the intended nucleotide edit positions. As used herein, regardless of relative 5′-3′ positioning in other context, the relative positions as between the PBS and the editing template, and the relative positions as among elements of a PEgRNA, are determined by the 5′ to 3′ order of the PEgRNA as a single molecule regardless of the position of sequences in the double stranded target DNA that may have complementarity or identity to elements of the PEgRNA. In some embodiments, the editing template is complementary or substantially complementary to a sequence on the PAM strand that is immediately downstream of the nick site, except for one or more non-complementary nucleotides at the intended nucleotide edit positions. The endogenous, e.g., genomic, sequence that is complementary or substantially complementary to the editing template, except for the one or more non-complementary nucleotides at the position corresponding to the intended nucleotide edit, may be referred to as an “editing target sequence” In some embodiments, the editing template has identity or substantial identity to a sequence on the target strand that is complementary to, or having the same position in the genome as, the editing target sequence, except for one or more insertions, deletions, or substitutions at the intended nucleotide edit positions. In some embodiments, the editing template encodes a single stranded DNA, wherein the single stranded DNA has identity or substantial identity to the editing target sequence except for one or more insertions, deletions, or substitutions at the positions of the one or more intended nucleotide edits.

[0095] In some embodiments, a PEgRNA complexes with and directs a prime editor to bind to the search target sequence of the target gene. In some embodiments, the bound prime editor generates a nick on the edit strand (PAM strand) of the target gene at the nick site. In some embodiments, a primer binding site (PBS) of the PEgRNA anneals with a free 3′ end formed at the nick site, and the prime editor initiates DNA synthesis from the nick site, using the free 3′ end as a primer. Subsequently, a single-stranded DNA encoded by the editing template of the PEgRNA is synthesized. In some embodiments, the newly synthesized single-stranded DNA comprises one or more intended nucleotide edits compared to an endogenous target gene sequence. Accordingly, in some embodiments, the editing template of a PEgRNA is complementary to a sequence in the edit strand except for one or more mismatches at the intended nucleotide edit positions in the editing template. The endogenous, e.g., genomic, sequence that is partially complementary to the editing template may be referred to as an “editing target sequence”. Accordingly, in some embodiments, the newly synthesized single stranded DNA has identity or substantial identity to a sequence in the editing target sequence, except for one or more insertions, deletions, or substitutions at the intended nucleotide edit positions.

[0096] In some embodiments, the newly synthesized single-stranded DNA equilibrates with the editing target on the edit strand of the target gene for pairing with the target strand of the target gene. In some embodiments, the editing target sequence of the target gene is excised by a flap endonuclease (FEN), for example, FEN1. In some embodiments, the FEN is an endogenous FEN, for example, in a cell comprising the target gene. In some embodiments, the FEN is provided as part of the prime editor, either linked to other components of the prime editor or provided in trans. In some embodiments, the newly synthesized single stranded DNA, which comprises the intended nucleotide edit, replaces the endogenous single stranded editing target sequence on the edit strand of the target gene. In some embodiments, the newly synthesized single stranded DNA and the endogenous DNA on the target strand form a heteroduplex DNA structure at the region corresponding to the editing target sequence of the target gene. In some embodiments, the newly synthesized single-stranded DNA comprising the nucleotide edit is paired in the heteroduplex with the target strand of the target DNA that does not comprise the nucleotide edit, thereby creating a mismatch between the two otherwise complementary strands. In some embodiments, the mismatch is recognized by DNA repair machinery, e.g., an endogenous DNA repair machinery. In some embodiments, through DNA repair, the intended nucleotide edit is incorporated into the target gene.

### Prime Editor

[0097] The term “prime editor (PE)” refers to the polypeptide or polypeptide components involved in prime editing, or any polynucleotide(s) encoding the polypeptide or polypeptide components. In various embodiments, a prime editor includes a polypeptide domain having DNA binding activity and a polypeptide domain having DNA polymerase activity. In some embodiments, the prime editor further comprises a polypeptide domain having nuclease activity. In some embodiments, the polypeptide domain having DNA binding activity comprises a nuclease domain or nuclease activity. In some embodiments, the polypeptide domain having nuclease activity comprises a nickase, or a fully active nuclease. As used herein, the term “nickase” refers to a nuclease capable of cleaving only one strand of a double-stranded DNA target. In some embodiments, the prime editor comprises a polypeptide domain that is an inactive nuclease. In some embodiments, the polypeptide domain having programmable DNA binding activity comprises a nucleic acid guided DNA binding domain, for example, a CRISPR-Cas protein, for example, a Cas9 nickase, a Cpf1 nickase, or another CRISPR-Cas nuclease. In some embodiments, the polypeptide domain having DNA polymerase activity comprises a template-dependent DNA polymerase, for example, a DNA-dependent DNA polymerase or an RNA-dependent DNA polymerase. In some embodiments, the DNA polymerase is a reverse transcriptase. In some embodiments, the prime editor comprises additional polypeptides involved in prime editing, for example, a polypeptide domain having a 5′ endonuclease activity, e.g., a 5′ endogenous DNA flap endonucleases (e.g., FEN1), for helping to drive the prime editing process towards the edited product formation. In some embodiments, the prime editor further comprises an RNA-protein recruitment polypeptide, for example, a MS2 coat protein.

[0098] A prime editor may be engineered. In some embodiments, the polypeptide components of a prime editor do not naturally occur in the same organism or cellular environment. In some embodiments, the polypeptide components of a prime editor may be of different origins or from different organisms. In some embodiments, a prime editor comprises a DNA binding domain and a DNA polymerase domain that are derived from different species. In some embodiments, a prime editor comprises a Cas polypeptide (DNA binding domain) and a reverse transcriptase polypeptide (DNA polymerase) that are derived from different species. For example, a prime editor may comprise a S. pyogenes Cas9 polypeptide and a Moloney murine leukemia virus (M-MLV) reverse transcriptase polypeptide.

[0099] In some embodiments, polypeptide domains of a prime editor may be fused or linked by a peptide linker to form a fusion protein. In other embodiments, a prime editor comprises one or more polypeptide domains provided in trans as separate proteins, which are capable of being associated to each other through non-peptide linkages or through aptamers or recruitment sequences. For example, a prime editor may comprise a DNA binding domain and a reverse transcriptase domain associated with each other by an RNA-protein recruitment aptamer, e.g., a MS2 aptamer, which may be linked to a PEgRNA. Prime editor polypeptide components may be encoded by one or more polynucleotides in whole or in part. In some embodiments, a single polynucleotide, construct, or vector encodes the prime editor fusion protein. In some embodiments, multiple polynucleotides, constructs, or vectors each encode a polypeptide domain or portion of a domain of a prime editor, or a portion of a prime editor fusion protein. For example, a prime editor fusion protein may comprise an N-terminal portion fused to an intein-N and a C-terminal portion fused to an intein-C, each of which is individually encoded by an AAV vector.

### Prime Editor Nucleotide Polymerase Domain

[0100] In some embodiments, a prime editor comprises a nucleotide polymerase domain, e.g., a DNA polymerase domain. The DNA polymerase domain may be a wild-type DNA polymerase domain, a full-length DNA polymerase protein domain, or may be a functional mutant, a functional variant, or a functional fragment thereof. In some embodiments, the polymerase domain is a template dependent polymerase domain. For example, the DNA polymerase may rely on a template polynucleotide strand, e.g., the editing template sequence, for new strand DNA synthesis. In some embodiments, the prime editor comprises a DNA-dependent DNA polymerase. For example, a prime editor having a DNA-dependent DNA polymerase can synthesize a new single stranded DNA using a PEgRNA editing template that comprises a DNA sequence as a template. In such cases, the PEgRNA is a chimeric or hybrid PEgRNA, and comprising an extension arm comprising a DNA strand. The chimeric or hybrid PEgRNA may comprise an RNA portion (including the spacer and the gRNA core) and a DNA portion (the extension arm comprising the editing template that includes a strand of DNA).

[0101] The DNA polymerases can be wild type polymerases from eukaryotic, prokaryotic, archaeal, or viral organisms, and/or the polymerases may be modified by genetic engineering, mutagenesis, or directed evolution-based processes. The polymerases can be a T7 DNA polymerase, T5 DNA polymerase, T4 DNA polymerase, Klenow fragment DNA polymerase, DNA polymerase III and the like. The polymerases can be thermostable, and can include Taq, Tne, Tma, Pfu, Tfl, Tth, Stoffel fragment, VENT® and DEEPVENT® DNA polymerases, KOD, Tgo, JDF3, and mutants, variants and derivatives thereof.

[0102] In some embodiments, the DNA polymerase is a bacteriophage polymerase, for example, a T4, T7, or phi29 DNA polymerase. In some embodiments, the DNA polymerase is an archaeal polymerase, for example, pol I type archaeal polymerase or a pol II type archaeal polymerase. In some embodiments, the DNA polymerase comprises a thermostable archaeal DNA polymerase. In some embodiments, the DNA polymerase comprises a eubacterial DNA polymerase, for example, Pol I, Pol II, or Pol III polymerase. In some embodiments, the DNA polymerase is a Pol I family DNA polymerase. In some embodiments, the DNA polymerase is a E. coli Pol I DNA polymerase. In some embodiments, the DNA polymerase is a Pol II family DNA polymerase. In some embodiments, the DNA polymerase is a Pyrococcus furiosus (Pfu) Pol II DNA polymerase. In some embodiments, the DNA Polymerase is a Pol IV family DNA polymerase. In some embodiments, the DNA polymerase is a E. coli Pol IV DNA polymerase. In some embodiments, the DNA polymerase comprises a eukaryotic DNA polymerase. In some embodiments, the DNA polymerase is a Pol-beta DNA polymerase, a Pol-lambda DNA polymerase, a Pol-sigma DNA polymerase, or a Pol-mu DNA polymerase. In some embodiments, the DNA polymerase is a Pol-alpha DNA polymerase. In some embodiments, the DNA polymerase is a POLA1 DNA polymerase. In some embodiments, the DNA polymerase is a POLA2 DNA polymerase. In some embodiments, the DNA polymerase is a Pol-delta DNA polymerase. In some embodiments, the DNA polymerase is a POLD1 DNA polymerase. In some embodiments, the DNA polymerase is a POLD2 DNA polymerase. In some embodiments, the DNA polymerase is a human POLD1 DNA polymerase. In some embodiments, the DNA polymerase is a human POLD2 DNA polymerase. In some embodiments, the DNA polymerase is a POLD3 DNA polymerase. In some embodiments, the DNA polymerase is a POLD4 DNA polymerase. In some embodiments, the DNA polymerase is a Pol-epsilon DNA polymerase. In some embodiments, the DNA polymerase is a POLE1 DNA polymerase. In some embodiments, the DNA polymerase is a POLE2 DNA polymerase. In some embodiments, the DNA polymerase is a POLE3 DNA polymerase. In some embodiments, the DNA polymerase is a Pol-eta (POLH) DNA polymerase. In some embodiments, the DNA polymerase is a Pol-iota (POLI) DNA polymerase. In some embodiments, the DNA polymerase is a Pol-kappa (POLK) DNA polymerase. In some embodiments, the DNA polymerase is a Rev1 DNA polymerase. In some embodiments, the DNA polymerase is a human Rev1 DNA polymerase. In some embodiments, the DNA polymerase is a viral DNA-dependent DNA polymerase. In some embodiments, the DNA polymerase is a B family DNA polymerases. In some embodiments, the DNA polymerase is a herpes simplex virus (HSV) UL30 DNA polymerase. In some embodiments, the DNA polymerase is a cytomegalovirus (CMV) UL54 DNA polymerase.

[0103] In some embodiments, the DNA polymerase is an archaeal polymerase. In some embodiments, the DNA polymerase is a Family B/pol I type DNA polymerase. For example, in some embodiments, the DNA polymerase is a homolog of Pfu from Pyrococcus furiosus. In some embodiments, the DNA polymerase is a pol II type DNA polymerase. For example, in some embodiments, the DNA polymerase is a homolog of P. furiosus DP1/DP2 2-subunit polymerase. In some embodiments, the DNA polymerase lacks 5′ to 3′ nuclease activity. Suitable DNA polymerases (pol I or pol II) can be derived from archaea with optimal growth temperatures that are similar to the desired assay temperatures.

[0104] In some embodiments, the DNA polymerase comprises a thermostable archaeal DNA polymerase. In some embodiments, the thermostable DNA polymerase is isolated or derived from Pyrococcus species (furiosus, species GB-D, woesii, abysii, horikoshi), Thermococcus species (kodakaraensis KOD1, litoralis, species 9 degrees North-7, species JDF-3, gorgonarius), Pyrodictium occultum, and Archaeoglobus fulgidus.

[0105] Polymerases may also be from eubacterial species. In some embodiments, the DNA polymerase is a Pol I family DNA polymerase. In some embodiments, the DNA polymerase is an E. coli Pol I DNA polymerase. In some embodiments, the DNA polymerase is a Pol II family DNA polymerase. In some embodiments, the DNA polymerase is a Pyrococcus furiosus (Pfu) Pol II DNA polymerase. In some embodiments, the DNA Polymerase is a Pol III family DNA polymerase. In some embodiments, the DNA Polymerase is a Pol IV family DNA polymerase. In some embodiments, the DNA polymerase is an E. coli Pol IV DNA polymerase. In some embodiments, the Pol I DNA polymerase is a DNA polymerase functional variant that lacks or has reduced 5′ to 3′ exonuclease activity.

[0106] Suitable thermostable pol I DNA polymerases can be isolated from a variety of thermophilic eubacteria, including Thermus species and Thermotoga maritima such as Thermus aquaticus (Taq), Thermus thermophilus (Tth) and Thermotoga maritima (Tma UlTma).

[0107] In some embodiments, a prime editor comprises an RNA-dependent DNA polymerase domain, for example, a reverse transcriptase (RT). A RT or an RT domain may be a wild type RT domain, a full-length RT domain, or may be a functional mutant, a functional variant, or a functional fragment thereof. An RT or an RT domain of a prime editor may comprise a wild-type RT, or may be engineered or evolved to contain specific amino acid substitutions, truncations, or variants. An engineered RT may comprise sequences or amino acid changes different from a naturally occurring RT. In some embodiments, the engineered RT may have improved reverse transcription activity over a naturally occurring RT or RT domain. In some embodiments, the engineered RT may have improved features over a naturally occurring RT, for example, improved thermostability, reverse transcription efficiency, or target fidelity. In some embodiments, a prime editor comprising the engineered RT has improved prime editing efficiency over a prime editor having a reference naturally occurring RT.

[0108] In some embodiments, a prime editor comprises a virus RT, for example, a retrovirus RT. Non-limiting examples of virus RT include Moloney murine leukemia virus (M-MLV or MLVRT or M-MLV RT); human T-cell leukemia virus type 1 (HTLV-1) RT; bovine leukemia virus (BLV) RT; Rous Sarcoma Virus (RSV) RT; human immunodeficiency virus (HIV) RT, M-MFV RT, Avian Sarcoma-Leukosis Virus (ASLV) RT, Rous Sarcoma Virus (RSV) RT, Avian Myeloblastosis Virus (AMV) RT, Avian Erythroblastosis Virus (AEV) Helper Virus MCAV RT, Avian Myelocytomatosis Virus MC29 Helper Virus MCAV RT, Avian Reticuloendotheliosis Virus (REV-T) Helper Virus REV-A RT, Avian Sarcoma Virus UR2 Helper Virus (UR2AV) RT, Avian Sarcoma Virus Y73 Helper Virus YAV RT, Rous Associated Virus (RAV) RT, and Myeloblastosis Associated Virus (MAV) RT, all of which may be suitably used in the methods and composition described herein.

[0109] In some embodiments, the prime editor comprises a wild-type M-MLV RT, a functional mutant, a functional variant, or a functional fragment thereof. In some embodiments, the prime editor comprises a reference M-MLV RT, a functional mutant, a functional variant, or a functional fragment thereof. In some embodiments, the RT domain or a RT is a M-MLV RT (e.g., wild-type M-MLV RT, a functional mutant, a functional variant, or a functional fragment thereof). In some embodiments, the RT domain or a RT is a M-MLV RT (e.g., a reference M-MLV RT, a functional mutant, a functional variant, or a functional fragment thereof). In some embodiments, a MMLV RT, e.g., reference MMLV RT, comprises a sequence as disclosed in SEQ ID NO: 14827.

[0110] In some embodiments, a reference M-MLV RT is a wild-type M-MLV RT. An exemplary sequence of a reference M-MLV RT is provided in SEQ ID NO: 14826. In some embodiments, the prime editor comprises a wild type M-MLV RT. An exemplary sequence of a wild type M-MLV RT is provided in SEQ ID NO: 14826.

(SEQ ID NO: 14826)
TLNIEDEHRLHETSKEPDVSLGSTWLSDFPQAWAETGGMGLAVRQAPLII
PLKATSTPVSIKQYPMSQEARLGIKPHIQRLLDQGILVPCQSPWNTPLLP
VKKPGTNDYRPVQDLREVNKRVEDIHPTVPNPYNLLSGLPPSHQWYTVLD
LKDAFFCLRLHPTSQPLFAFEWRDPEMGISGQLTWTRLPQGFKNSPTLFD
EALHRDLADFRIQHPDLILLQYVDDLLLAATSELDCQQGTRALLQTLGNL
GYRASAKKAQICQKQVKYLGYLLKEGQRWLTEARKETVMGQPTPKTPRQL
REFLGTAGFCRLWIPGFAEMAAPLYPLTKTGTLFNWGPDQQKAYQEIKQA
LLTAPALGLPDLTKPFELFVDEKQGYAKGVLTQKLGPWRRPVAYLSKKLD
PVAAGWPPCLRMVAAIAVLTKDAGKLTMGQPLVILAPHAVEALVKQPPDR
WLSNARMTHYQALLLDTDRVQFGPVVALNPATLLPLPEEGLQHNCLDILA
EAHGTRPDLTDQPLPDADHTWYTDGSSLLQEGQRKAGAAVTTETEVIWAK
ALPAGTSAQRAELIALTQALKMAEGKKLNVYTDSRYAFATAHIHGEIYRR
RGLLTSEGKEIKNKDEILALLKALFLPKRLSIIHCPGHQKGHSAEARGNR
MADQAARKAAITETPDTSTLLIENSSP

[0111] In some embodiments, the prime editor comprises a reference M-MLV RT. An exemplary amino acid sequence of a reference M-MLV RT is provided in SEQ ID NO: 14827

(SEQ ID NO: 14827)
TLNIEDEYRLHETSKEPDVSLGSTWLSDFPQAWAETGGMGLAVRQAPLII
PLKATSTPVSIKQYPMSQEARLGIKPHIQRLLDQGILVPCQSPWNTPLLP
VKKPGTNDYRPVQDLREVNKRVEDIHPTVPNPYNLLSGLPPSHQWYTVLD
LKDAFFCLRLHPTSQPLFAFEWRDPEMGISGQLTWTRLPQGFKNSPTLFD
EALHRDLADFRIQHPDLILLQYVDDLLLAATSELDCQQGTRALLQTLGNL
GYRASAKKAQICQKQVKYLGYLLKEGQRWLTEARKETVMGQPTPKTPRQL
REFLGTAGFCRLWIPGFAEMAAPLYPLTKTGTLFNWGPDQQKAYQEIKQA
LLTAPALGLPDLTKPFELFVDEKQGYAKGVLTQKLGPWRRPVAYLSKKLD
PVAAGWPPCLRMVAAIAVLTKDAGKLTMGQPLVILAPHAVEALVKQPPDR
WLSNARMTHYQALLLDTDRVQFGPVVALNPATLLPLPEEGLQHNCLDILA
EAHGTRPDLTDQPLPDADHTWYTDGSSLLQEGQRKAGAAVTTETEVIWAK
ALPAGTSAQRAELIALTQALKMAEGKKLNVYTDSRYAFATAHIHGEIYRR
RGLLTSEGKEIKNKDEILALLKALFLPKRLSIIHCPGHQKGHSAEARGNR
MADQAARKAAITETPDTSTLLIENSSP

[0112] In some embodiments, the prime editor comprises a M-MLV RT comprising one or more of amino acid substitutions P51X, S67X, E69X, L139X, T197X, D200X, H204X, F209X, E302X, T306X, F309X, W313X, T330X, L345X, L435X, N454X, D524X, E562X, D583X, H594X, L603X, E607X, or D653X as compared to the reference M-MLV RT as set forth in SEQ ID NO: 14827, where X is any amino acid other than the original amino acid in the reference M-MLV RT. In some embodiments, the prime editor comprises a M-MLV RT comprising one or more of amino acid substitutions P51L, S67K, E69K, L139P, T197A, D200N, H204R, F209N, E302K, E302R, T306K, F309N, W313F, T330P, 1345G, L435G, N454K, D524G, E562Q, D583N, H594Q, L603W, E607K, and D653N as compared to the reference M-MLV RT as set forth in SEQ ID NO: 14827. In some embodiments, the prime editor comprises a M-MLV RT comprising one or more amino acid substitutions D200N, T330P, L603W, T306K, and W313F as compared to the wild type M-MLV RT (e.g., SEQ ID NO: 14826), e.g., as set forth in SEQ ID NO: 14828 (MMLV-RT^{5M}). In some embodiments, the prime editor comprises a reference M-MLV RT, having an amino acid sequence as set forth in SEQ ID NO: 14828.

(SEQ ID NO: 14828)
TLNIEDEYRLHETSKEPDVSLGSTWLSDFPQAWAETGGMGLAVRQAPLII
PLKATSTPVSIKQYPMSQEARLGIKPHIQRLLDQGILVPCQSPWNTPLLP
VKKPGTNDYRPVQDLREVNKRVEDIHPTVPNPYNLLSGLPPSHQWYTVLD
LKDAFFCLRLHPTSQPLFAFEWRDPEMGISGQLTWTRLPQGFKNSPTLFN
EALHRDLADFRIQHPDLILLQYVDDLLLAATSELDCQQGTRALLQTLGNL
GYRASAKKAQICQKQVKYLGYLLKEGQRWLTEARKETVMGQPTPKTPRQL
REFLGKAGFCRLFIPGFAEMAAPLYPLTKPGTLFNWGPDQQKAYQEIKQA
LLTAPALGLPDLTKPFELFVDEKQGYAKGVLTQKLGPWRRPVAYLSKKLD
PVAAGWPPCLRMVAAIAVLTKDAGKLTMGQPLVILAPHAVEALVKQPPDR
WLSNARMTHYQALLLDTDRVQFGPVVALNPATLLPLPEEGLQHNCLDILA
EAHGTRPDLTDQPLPDADHTWYTDGSSLLQEGQRKAGAAVTTETEVIWAK
ALPAGTSAQRAELIALTQALKMAEGKKLNVYTDSRYAFATAHIHGEIYRR
RGWLTSEGKEIKNKDEILALLKALFLPKRLSIIHCPGHQKGHSAEARGNR
MADQAARKAAITETPDTSTLLIENSSP

[0113] In some embodiments, the prime editor comprises a M-MLV RT comprising amino acid substitutions D200N, T330P, L603W, T306K, and W313F as compared to the reference M-MLV RT (e.g., SEQ ID NO: 14827) as set forth in SEQ ID NO: 14828. In some embodiments, a prime editor may comprise amino acid substitutions D200N, T330P, L603W, T306K, and W313F as compared to a reference M-MLV RT.

[0114] In some embodiments, an RT variant may be a functional fragment of a reference RT that has 1, 2, 3, 4, 5, 6, 7, 8, 9, 10, 11, 12, 13, 14, 15, 16, 17, 18, 19, 20, 21, 22, 21, 24, 25, 26, 27, 28, 29, 30, 31, 32, 33, 34, 35, 36, 37, 38, 39, 40, 41, 42, 43, 44, 45, 46, 47, 48, 49, 50, or up to 100, or up to 200, or up to 300, or up to 400, or up to 500 or more amino acid changes compared to a wild type RT. In some embodiments, the RT variant comprises a fragment of a wild type RT, such that the fragment is about 70% identical, about 80% identical, about 90% identical, about 95% identical, about 96% identical, about 97% identical, about 98% identical, about 99% identical, about 99.5% identical, or about 99.9% identical to the corresponding fragment of the wild type RT (e.g., SEQ ID NO: 14826). In some embodiments, the fragment is 30%, 35%, 40%, 45%, 50%, 55%, 60%, 65%, 70%, 75%, 80%, 85%, 90%, 95% identical, 96%, 97%, 98%, 99%, or 99.5% of the amino acid length of a corresponding type RT (M-MLV reverse transcriptase) (e.g., SEQ ID NO: 14826). In some embodiments, the RT variant comprises a fragment of a reference RT, such that the fragment is about 70% identical, about 80% identical, about 90% identical, about 95% identical, about 96% identical, about 97% identical, about 98% identical, about 99% identical, about 99.5% identical, or about 99.9% identical to the corresponding fragment of the reference RT, e.g., SEQ ID NO: 14827. In some embodiments, the fragment is 30%, 35%, 40%, 45%, 50%, 55%, 60%, 65%, 70%, 75%, 80%, 85%, 90%, 95% identical, 96%, 97%, 98%, 99%, or 99.5% of the amino acid length of a reference RT (M-MLV reverse transcriptase) (e.g., SEQ ID NO: 14827.

[0115] In some embodiments, the fragment is 30%, 35%, 40%, 45%, 50%, 55%, 60%, 65%, 70%, 75%, 80%, 85%, 90%, 95% identical, 96%, 97%, 98%, 99%, or 99.5% of the amino acid length of a corresponding type RT (M-MLV reverse transcriptase) (e.g., SEQ ID NO: 14828).

[0116] In some embodiments, the RT functional fragment is at least 100 amino acids in length. In some embodiments, the fragment is at least 100, 150, 200, 250, 300, 350, 400, 450, 500, 550, or up to 600 or more amino acids in length.

[0117] In still other embodiments, the functional RT variant is truncated at the N-terminus or the C-terminus, or both, by a certain number of amino acids which results in a truncated variant which still retains sufficient DNA polymerase function. In some embodiments, the RT truncated variant has a truncation of at least 1, at least 2, at least 3, at least 4, at least 5, at least 6, at least 7, at least 8, at least 9, at least 10, at least 11, at least 12, at least 13, at least 14, at least 15, at least 16, at least 17, at least 18, at least 19, at least 20, at least 21, at least 22, at least 23, at least 24, at least 25, at least 30, 40, 50, 60, 70, 80, 90, 100, 110, 120, 130, 140, 150, 160, 170, 180, 190, 200, 210, 220, 230, 240, or 250 amino acids at the N-terminal end compared to a reference RT, e.g., a wild type RT. In some embodiments, the reference RT is a wild type M-MLV RT. In other embodiments, the RT truncated variant has a truncation of at least 1, at least 2, at least 3, at least 4, at least 5, at least 6, at least 7, at least 8, at least 9, at least 10, at least 11, at least 12, at least 13, at least 14, at least 15, at least 16, at least 17, at least 18, at least 19, at least 20, at least 21, at least 22, at least 23, at least 24, at least 25, at least 30, 40, 50, 60, 70, 80, 90, 100, 110, 120, 130, 140, 150, 160, 170, 180, 190, 200, 210, 220, 230, 240, or 250 amino acids at the C-terminal end compared to a reference RT, e.g., a wild type RT. In some embodiments, the reference RT is a wild type M-MLV RT. In still other embodiments, the RT truncated variant has a truncation at the N-terminal and the C-terminal end compared to a reference RT, e.g., a wild type RT. In some embodiments, the N-terminal truncation and the C-terminal truncation are of the same length. In some embodiments, the N-terminal truncation and the C-terminal truncation are of different lengths.

[0118] For example, the prime editors disclosed herein may include a functional variant of a wild type M-MLV reverse transcriptase. In some embodiments, the prime editor comprises a functional variant of a wild type M-MLV RT, wherein the functional variant of M-MLV RT is truncated after amino acid position 502 compared to a wild type M-MLV RT as set forth in SEQ ID NO: 14827. In some embodiments, the functional variant of M-MLV RT further comprises a D200X, T306X, W313X, and/or T330X amino acid substitution compared to compared to a wild type M-MLV RT as set forth in SEQ ID NO: 14827, wherein X is any amino acid other than the original amino acid. In some embodiments, the functional variant of M-MLV RT further comprises a D200N, T306K, W313F, and/or T330P amino acid substitution compared to a wild type M-MLV RT as set forth in SEQ ID NO: 14827, wherein X is any amino acid other than the original amino acid. In some embodiments, the nucleotide polymerase domain is a polynucleotide polymerase domain. In some embodiments, the polynucleotide (e.g., a DNA polynucleotide, a RNA polynucleotide, e.g., an mRNA polynucleotide) encodes a MMLV-RT polypeptide that comprises an amino acid sequences that has at least 80%, 85%, 86%, 87%, 88%, 89%, 90%, 91%, 92%, 93%, 94%, 95%, 96%, 97%, 98%, 99%, or 100% identity with an amino acid sequence as set forth in any of the SEQ ID NOs:14826-14829.

[0119] In some embodiments, a prime editor comprises a eukaryotic RT, for example, a yeast, drosophila, rodent, or primate RT. In some embodiments, the prime editor comprises a Group II intron RT, for example, a. Geobacillus stearothermophilus Group II Intron (GsI-IIC) RT or a Eubacterium rectale group II intron (Eu.re.I2) RT. In some embodiments, the prime editor comprises a retron RT.

[0120] In some embodiments, a prime editor comprises a eukaryotic RT, for example, a yeast, drosophila, rodent, or primate RT. In some embodiments, the prime editor comprises a Group II intron RT, for example, a. Geobacillus stearothermophilus Group II Intron (GsI-IIC) RT or a Eubacterium rectale group II intron (Eu.re.I2) RT. In some embodiments, the prime editor comprises a retron RT.

### Programmable DNA Binding Domain

[0121] In some embodiments, the DNA-binding domain of a prime editor is a programmable DNA binding domain. In some embodiments, the prime editors provided herein comprise a DNA binding domain comprising an amino acid sequence that is at least 50%, at least 60%, at least 70%, at least 75%, at least 80%, 85%, at least 86%, at least 87%, at least 88%, at least 89%, at least 90%, at least 91%, at least 92%, at least 93%, at least 94%, at least 95%, at least 96%, at least 97%, at least 98%, at least 99%, or 100% identical to any one of the sequences set forth in SEQ ID NOs: 14829-14855 or 14876. In some embodiments, the DNA binding domain comprises an amino acid sequence that has no more than 1, 2, 3, 4, 5, 6, 7, 8, 9, 10, 11, 12, 13, 14, 15, 16, 17, 18, 19, or 20 differences e.g., mutations e.g., deletions, substitutions and/or insertions compared to any one of the amino acid sequences set forth in SEQ ID NOs: 14829-14855 or 14876. In some embodiments, the DNA-binding domain of a prime editor is a programmable DNA binding domain. A programmable DNA binding domain refers to a protein domain that is designed to bind a specific nucleic acid sequence, e.g., a target DNA or a target RNA. In some embodiments, the DNA-binding domain is a polynucleotide programmable DNA-binding domain that can associate with a guide polynucleotide (e.g., a PEgRNA) that guides the DNA-binding domain to a specific DNA sequence, e.g., a search target sequence in a target gene. In some embodiments, the polynucleotide (e.g., a DNA polynucleotide, a RNA polynucleotide, e.g., an mRNA polynucleotide) encodes a Cas polypeptide that comprises an amino acid sequences that has at least 80%, 85%, 86%, 87%, 88%, 89%, 90%, 91%, 92%, 93%, 94%, 95%, 96%, 97%, 98%, 99%, or 100% identity with an amino acid sequence as set forth in any of the SEQ ID NOs: 14829-14855, 14876, 14970-14974, or 14908-14910. In some embodiments, the DNA-binding domain comprises a Clustered Regularly Interspaced Short Palindromic Repeats (CRISPR) Associated (Cas) protein. A Cas protein may comprise any Cas protein described herein or a functional fragment or functional variant thereof. In some embodiments, a DNA-binding domain may also comprise a zinc-finger protein domain. In other cases, a DNA-binding domain comprises a transcription activator-like effector domain (TALE). In some embodiments, the DNA-binding domain comprises a DNA nuclease. For example, the DNA-binding domain of a prime editor may comprise an RNA-guided DNA endonuclease, e.g., a Cas protein. In some embodiments, the DNA-binding domain comprises a zinc finger nuclease (ZFN) or a transcription activator like effector domain nuclease (TALEN), where one or more zinc finger motifs or TALE motifs are associated with one or more nucleases, e.g., a Fok I nuclease domain.

[0122] In some embodiments, the DNA-binding domain comprises a nuclease activity. In some embodiments, the DNA-binding domain of a prime editor comprises an endonuclease domain having single strand DNA cleavage activity. For example, the endonuclease domain may comprise a FokI nuclease domain. In some embodiments, the DNA-binding domain of a prime editor comprises a nuclease having full nuclease activity. In some embodiments, the DNA-binding domain of a prime editor comprises a nuclease having modified or reduced nuclease activity as compared to a wild type endonuclease domain. For example, the endonuclease domain may comprise one or more amino acid substitutions as compared to a wild type endonuclease domain. In some embodiments, the DNA-binding domain of a prime editor has nickase activity. In some embodiments, the DNA-binding domain of a prime editor comprises a Cas protein domain that is a nickase. In some embodiments, compared to a wild type Cas protein, the Cas nickase comprises one or more amino acid substitutions in a nuclease domain that reduces or abolishes its double strand nuclease activity but retains DNA binding activity. In some embodiments, the Cas nickase comprises an amino acid substitution in a HNH domain. In some embodiments, the Cas nickase comprises an amino acid substitution in a RuvC domain.

[0123] In some embodiments, the DNA-binding domain comprises a CRISPR associated protein (Cas protein) domain. A Cas protein may be a Class 1 or a Class 2 Cas protein. A Cas protein can be a type I, type II, type III, type IV, type V Cas protein, or a type VI Cas protein. Non-limiting examples of Cas proteins include Cas1, Cas1B, Cas2, Cas3, Cas4, Cas5, Cas5d, Cas5t, Cas5h, Cas5a, Cas6, Cas7, Cas8, Cas8a, Cas8b, Cas8c, Cas9 (e.g., Csn1 or Csx12), Cas10, Cas10d, Cas12a/Cpf1, Cas12b/C2c1, Cas12c/C2c3, Cas12d/CasY, Cas12e/CasX, Cas12g, Cas12h, Cas12i, Csy1, Csy2, Csy3, Csy4, Cse1, Cse2, Cse3, Cse4, Cse5e, Csc1, Csc2, Csa5, Csn1, Csn2, Csm1, Csm2, Csm3, Csm4, Csm5, Csm6, Cmr1, Cmr3, Cmr4, Cmr5, Cmr6, Csb1, Csb2, Csb3, Csx17, Csx14, Csx10, Csx16, CsaX, Csx3, Csx1, Csx1S, Csx11, Csf1, Csf2, CsO, Csf4, Csd1, Csd2, Cst1, Cst2, Csh1, Csh2, Csa1, Csa2, Csa3, Csa4, Csa5, Type II Cas effector proteins, Type V Cas effector proteins, Type VI Cas effector proteins, CARF, DinG, Cpf1, Cas12b/C2c1, Cas12c/C2c3, Cas12b/C2c1, Cas12c/C2c3, SpCas9 (K855A), eSpCas9(1.1), SpCas9-HF1, hyper accurate Cas9 variant (HypaCas9), Cas Φ, and homologues, modified or engineered variants, mutants, and/or functional fragments thereof. A Cas protein can be a chimeric Cas protein that is fused to other proteins or polypeptides. A Cas protein can be a chimera of various Cas proteins, for example, comprising domains of Cas proteins from different organisms.

[0124] A Cas protein, e.g., Cas9, can be from any suitable organism. In some aspects, the organism is Streptococcus pyogenes (S. pyogenes). In some aspects, the organism is Staphylococcus aureus (S. aureus). In some aspects, the organism is Streptococcus thermophilus (S. thermophilus). In some embodiments, the organism is Staphylococcus lugdunensis. Non-limiting examples of suitable organism include Streptococcus pyogenes, Streptococcus thermophilus, Streptococcus sp., Staphylococcus aureus, Nocardiopsis dassonvillei, Streptomyces pristinae spiralis, Streptomyces viridochromo genes, Streptomyces viridochromogenes, Streptosporangium roseum, Streptosporangium roseum, AlicyclobacHlus acidocaldarius, Bacillus pseudomycoides, Bacillus selenitireducens, Exiguobacterium sibiricum, Lactobacillus delbrueckii, Lactobacillus salivarius, Microscilla marina, Burkholderiales bacterium, Polaromonas naphthalenivorans, Polaromonas sp., Crocosphaera watsonii, Cyanothece sp., Microcystis aeruginosa, Pseudomonas aeruginosa, Synechococcus sp., Acetohalobium arabaticum, Ammonifex degensii, Caldicelulosiruptor becscii, Candidatus Desulforudis, Clostridium botulinum, Clostridium difficile, Finegoldia magna, Natranaerobius thermophilus, Pelotomaculum thermopropionicum, Acidithiobacillus caldus, Acidithiobacillus ferrooxidans, Allochromatium vinosum, Marinobacter sp., Nitrosococcus halophilus, Nitrosococcus watsoni, Pseudoalteromonas haloplanktis, Ktedonobacter racemifer, Methanohalobium evestigatum, Anabaena variabilis, Nodularia spumigena, Nostoc sp., Arthrospira maxima, Arthrospira platensis, Arthrospira sp., Lyngbya sp., Microcoleus chthonoplastes, Oscillatoria sp., Petrotoga mobilis, Thermosipho africanus, Acaryochloris marina, Leptotrichia shahii, and Francisella novicida. In some embodiments, the organism is Streptococcus pyogenes (S. pyogenes). In some embodiments, the organism is Staphylococcus aureus (S. aureus). In some embodiments, the organism is Streptococcus thermophilus (S. thermophilus). In some embodiments, the organism is Staphylococcus lugdunensis (S. lugdunensis).

[0125] In some embodiments, a Cas protein can be derived from a variety of bacterial species including, but not limited to, Veillonella atypical, Fusobacterium nucleatum, Filifactor alocis, Solobacterium moorei, Coprococcus catus, Treponema denticola, Peptoniphilus duerdenii, Catenibacterium mitsuokai, Streptococcus mutans, Listeria innocua, Staphylococcus pseudintermedius, Acidaminococcus intestine, Olsenella uli, Oenococcus kitaharae, Bifidobacterium bifidum, Lactobacillus rhamnosus, Lactobacillus gasseri, Finegoldia magna, Mycoplasma mobile, Mycoplasma gallisepticum, Mycoplasma ovipneumoniae, Mycoplasma canis, Mycoplasma synoviae, Eubacterium rectale, Streptococcus thermophilus, Eubacterium dolichum, Lactobacillus coryniformis subsp. Torquens, Ilyobacter polytropus, Ruminococcus albus, Akkermansia muciniphila, Acidothermus cellulolyticus, Bifidobacterium longum, Bifidobacterium dentium, Corynebacterium diphtheria, Elusimicrobium minutum, Nitratifractor salsuginis, Sphaerochaeta globus, Fibrobacter succinogenes subsp. Succinogenes, Bacteroides fragilis, Capnocytophaga ochracea, Rhodopseudomonas palustris, Prevotella micans, Prevotella ruminicola, Flavobacterium columnare, Aminomonas paucivorans, Rhodospirillum rubrum, Candidatus Puniceispirillum marinum, Verminephrobacter eiseniae, Ralstonia syzygii, Dinoroseobacter shibae, Azospirillum, Nitrobacter hamburgensis, Bradyrhizobium, Wolinella succinogenes, Campylobacter jejuni subsp. Jejuni, Helicobacter mustelae, Bacillus cereus, Acidovorax ebreus, Clostridium perfringens, Parvibaculum lavamentivorans, Roseburia intestinalis, Neisseria meningitidis, Pasteurella multocida subsp. Multocida, Sutterella wadsworthensis, proteobacterium, Legionella pneumophila, Parasutterella excrementihominis, Wolinella succinogenes, and Francisella novicida.

[0126] In some embodiments, a Cas protein, e.g., Cas9, can be a wild type or a modified form of a Cas protein. In some embodiments, a Cas protein, e.g., Cas9, can be a nuclease active variant, nuclease inactive variant, a nickase, or a functional variant or functional fragment of a wild type Cas protein. In some embodiments, a Cas protein, e.g., Cas9, can be a wild type or a modified form of a Cas protein. A Cas protein, e.g., Cas9, can be a nuclease active variant, nuclease inactive variant, a nickase, or a functional variant or functional fragment of a wild type Cas protein. A Cas protein, e.g., Cas9, can comprise an amino acid change such as a deletion, insertion, substitution, fusion, chimera, or any combination thereof relative to a corresponding wild-type version of the Cas protein. In some embodiments, a Cas protein can be a polypeptide with at least about 50%, 60%, 70%, 80%, 90%, 91%, 92%, 93%, 94%, 95%, 96%, 97%, 98%, 99%, or 100% sequence identity or sequence similarity to a wild type exemplary Cas protein.

[0127] A Cas protein, e.g., Cas9, may comprise one or more domains. Non-limiting examples of Cas domains include, guide nucleic acid recognition and/or binding domain, nuclease domains (e.g., DNase or RNase domains, RuvC, HNH), DNA binding domain, RNA binding domain, helicase domains, protein-protein interaction domains, and dimerization domains. In various embodiments, a Cas protein comprises a guide nucleic acid recognition and/or binding domain can interact with a guide nucleic acid, and one or more nuclease domains that comprise catalytic activity for nucleic acid cleavage.

[0128] In some embodiments, a Cas protein, e.g., Cas9, comprises one or more nuclease domains. A Cas protein can comprise an amino acid sequence having at least about 50%, 60%, 70%, 80%, 90%, 91%, 92%, 93%, 94%, 95%, 96%, 97%, 98%, 99%, or 100% sequence identity to a nuclease domain (e.g., RuvC domain, HNH domain) of a wild-type Cas protein. In some embodiments, a Cas protein comprises a single nuclease domain. For example, a Cpf1 may comprise a RuvC domain but lacks HNH domain. In some embodiments, a Cas protein comprises two nuclease domains, e.g., a Cas9 protein can comprise an HNH nuclease domain and a RuvC nuclease domain.

[0129] In some embodiments, a prime editor comprises a Cas protein, e.g., Cas9, wherein all nuclease domains of the Cas protein are active. In some embodiments, a prime editor comprises a Cas protein having one or more inactive nuclease domains. One or a plurality of the nuclease domains (e.g., RuvC, HNH) of a Cas protein can be deleted or mutated so that they are no longer functional or comprise reduced nuclease activity. In some embodiments, a Cas protein, e.g., Cas9, comprising mutations in a nuclease domain has reduced (e.g. nickase) or abolished nuclease activity while maintaining its ability to target a nucleic acid locus at a search target sequence when complexed with a guide nucleic acid, e.g. a PEgRNA.

[0130] In some embodiments, a prime editor comprises a Cas nickase that can bind to the target gene in a sequence-specific manner and generate a single-strand break at a protospacer within double-stranded DNA in the target gene, but not a double-strand break. For example, the Cas nickase can cleave the edit strand or the non-edit strand of the target gene, but may not cleave both. In some embodiments, a prime editor comprises a Cas nickase comprising two nuclease domains (e.g., Cas9), with one of the two nuclease domains modified to lack catalytic activity or deleted. In some embodiments, the Cas nickase of a prime editor comprises a nuclease inactive RuvC domain and a nuclease active HNH domain. In some embodiments, the Cas nickase of a prime editor comprises a nuclease inactive HNH domain and a nuclease active RuvC domain. In some embodiments, a prime editor comprises a Cas9 nickase having an amino acid substitution in the RuvC domain e.g., an amino acid substitution that reduces or abolishes nuclease activity of the RuvC domain. In some embodiments, the Cas9 nickase comprises a D10X amino acid substitution compared to a wild type S. pyogenes Cas9, wherein X is any amino acid other than D. In some embodiments, a prime editor comprises a Cas9 nickase having an amino acid substitution in the HNH domain, e.g., an amino acid substitution that reduces or abolishes nuclease activity of the HNH domain. In some embodiments, the Cas9 nickase comprises a H840X amino acid substitution compared to a wild type S. pyogenes Cas9, wherein X is any amino acid other than H.

[0131] In some embodiments, a prime editor comprises a Cas protein that can bind to the target gene in a sequence-specific manner but lacks or has abolished nuclease activity and may not cleave either strand of a double stranded DNA in a target gene. Abolished activity or lacking activity can refer to an enzymatic activity less than 1%, less than 2%, less than 3%, less than 4%, less than 5%, less than 6%, less than 7%, less than 8%, less than 9%, or less than 10% activity compared to a wild-type exemplary activity (e.g., wild-type Cas9 nuclease activity). In some embodiments, a Cas protein of a prime editor completely lacks nuclease activity. A nuclease, e.g., Cas9, that lacks nuclease activity may be referred to as nuclease inactive or “nuclease dead” (abbreviated by “d”). A nuclease dead Cas protein (e.g., dCas, dCas9) can bind to a target polynucleotide but may not cleave the target polynucleotide. In some aspects, a dead Cas protein is a dead Cas9 protein. In some embodiments, a prime editor comprises a nuclease dead Cas protein wherein all of the nuclease domains (e.g., both RuvC and HNH nuclease domains in a Cas9 protein; RuvC nuclease domain in a Cpf1 protein) are mutated to lack catalytic activity, or are deleted.

[0132] A Cas protein can be modified. A Cas protein, e.g., Cas9, can be modified to increase or decrease nucleic acid binding affinity, nucleic acid binding specificity, and/or enzymatic activity. Cas proteins can also be modified to change any other activity or property of the protein, such as stability. For example, one or more nuclease domains of the Cas protein can be modified, deleted, or inactivated, or a Cas protein can be truncated to remove domains that are not essential for the function of the protein or to optimize (e.g., enhance or reduce) the activity of the Cas protein.

[0133] A Cas protein can be a fusion protein. For example, a Cas protein can be fused to a cleavage domain, an epigenetic modification domain, a transcriptional regulation domain, or a polymerase domain. A Cas protein can also be fused to a heterologous polypeptide providing increased or decreased stability. The fused domain or heterologous polypeptide can be located at the N-terminus, the C-terminus, or internally within the Cas protein.

[0134] In some embodiments, the Cas protein of a prime editor is a Class 2 Cas protein. In some embodiments, the Cas protein is a type II Cas protein. In some embodiments, the Cas protein is a Cas9 protein, a modified version of a Cas9 protein, a Cas9 protein homolog, mutant, variant, or a functional fragment thereof. As used herein, a Cas9, Cas9 protein, Cas9 polypeptide or a Cas9 nuclease refers to an RNA guided nuclease comprising one or more Cas9 nuclease domains and a Cas9 gRNA binding domain having the ability to bind a guide polynucleotide, e.g., a PEgRNA. A Cas9 protein may refer to a wild type Cas9 protein from any organism or a homolog, ortholog, or paralog from any organisms; any functional mutants or functional variants thereof; or any functional fragments or domains thereof. In some embodiments, a prime editor comprises a full-length Cas9 protein. In some embodiments, the Cas9 protein can generally comprises at least about 50%, 60%, 70%, 80%, 90%, 100% sequence identity to a wild type reference Cas9 protein (e.g., Cas9 from S. pyogenes). In some embodiments, the Cas9 comprises an amino acid change such as a deletion, insertion, substitution, fusion, chimera, or any combination thereof as compared to a wild type reference Cas9 protein.

[0135] In some embodiments, a Cas9 protein may comprise a Cas9 protein from Streptococcus pyogenes (Sp), Staphylococcus aureus (Sa), Streptococcus canis (Sc), Streptococcus thermophilus (St), Staphylococcus lugdunensis (Slu), Neisseria meningitidis (Nm), Campylobacter jejuni (Cj), Francisella novicida (Fn), or Treponema denticola (Td), or any Cas9 homolog or ortholog from an organism known in the art. In some embodiments, a Cas9 polypeptide is a SpCas9 polypeptide, e.g., comprising an amino acid sequence as set forth in NCBI Accession No. WP_038431314 or a fragment or variant thereof. In some embodiments, a Cas9 polypeptide is a SaCas9 polypeptide, e.g., comprising an amino acid sequence as set forth in Uniprot Accession No. J7RUA5 or a fragment or variant thereof. In some embodiments, a Cas9 polypeptide is a ScCas9 polypeptide, e.g., comprising an amino acid sequence as set forth in Uniprot Accession No. AOA3P5YA78 or a fragment or variant thereof. In some embodiments, a Cas9 polypeptide is a StCas9 polypeptide, e.g., comprising an amino acid sequence as set forth in NCBI Accession No. WP_007896501.1 or a fragment or variant thereof. In some embodiments, a Cas9 polypeptide is a SluCas9 polypeptide, e.g., comprising an amino acid sequence as set forth in any of NCBI Accession No. WP_230580236.1 or WP_250638315.1 or WP_242234150.1, WP_241435384.1, WP_002460848.1, KAK58371.1, or a fragment or variant thereof. In some embodiments, a Cas9 polypeptide is a NmCas9 polypeptide, e.g., comprising an amino acid sequence as set forth in any of NCBI Accession No. WP_002238326.1 or WP_061704949.1 or a fragment or variant thereof. In some embodiments, a Cas9 polypeptide is a CjCas9 polypeptide, e.g., comprising an amino acid sequence as set forth in any of NCBI Accession No. WP_100612036.1, WP_116882154.1, WP_116560509.1, WP_116484194.1, WP_116479303.1, WP_115794652.1, WP_100624872.1, or a fragment or variant thereof. In some embodiments, a Cas9 polypeptide is a FnCas9 polypeptide, e.g., comprising the amino acid sequence as set forth in Uniprot Accession No. A0Q5Y3 or a fragment or variant thereof. In some embodiments, a Cas9 polypeptide is a TdCas9 polypeptide, e.g., comprising the amino acid sequence as set forth in NCBI Accession No. WP_147625065.1 or a fragment or variant thereof. In some embodiments, a Cas9 polypeptide is a chimera comprising domains from two or more of the organisms described herein or those known in the art. In some embodiments, a Cas9 polypeptide is a Cas9 polypeptide from Streptococcus macacae, e.g., comprising the amino acid sequence as set forth in NCBI Accession No. WP_003079701.1 or a fragment or variant thereof. In some embodiments, a Cas9 polypeptide is a Cas9 polypeptide generated by replacing a PAM interaction domain of a SpCas9 with that of a Streptococcus macacae Cas9 (Spy-mac Cas9). Exemplary Cas sequences are provided in Table 86 below. In some embodiments, a prime editor comprises a Cas9 protein, lacking a N-terminus methionine having an amino acid sequence as according to any of the SEQ ID NOs: 14970-14974 or 14908-14910.

[0136] In some embodiments, a Cas9 protein comprises a Cas9 protein from Streptococcus pyogenes (Sp), e.g., as according to NC_002737.2:854751-858857 or the protein encoded by UniProt Q99ZW2, e.g., as according to SEQ ID NO: 14829. In some embodiments, the Cas9 protein is a SpCas9. In some embodiments, a SpCas9 can be a wild type SpCas9, a SpCas9 variant, or a nickase SpCas9. In some embodiments, the SpCas9 lacks the N-terminus methionine relative to a corresponding SpCas9 (e.g., wild type SpCas9, a SpCas9 variant or a nickase SpCas9). In some embodiments, a prime editor comprises a Cas9 protein, having an amino acid sequence as according to SEQ ID NO: 14829, not including the N-terminus methionine. In some embodiments, a wild type SpCas9 comprises an amino acid sequence set forth in SEQ ID NO: 14829. In some embodiments, a prime editor comprises a Cas9 protein, having an amino acid sequence as according to SEQ ID NO: 14829, not including the N-terminus methionine. In some embodiments, a prime editor comprises a Cas9 protein, lacking a N-terminus methionine having an amino acid sequence as according to SEQ ID NO: 14970. In some embodiments, a prime editor comprises a Cas9 protein comprising one or more mutations (e.g., amino acid substitutions, insertions and/or deletions relative to a corresponding wild type Cas9 protein (e.g., wild type SpCas9). In some embodiments, the Cas9 protein comprising one or mutations relative to a wild type Cas9 protein comprises an amino acid sequence set forth in SEQ ID NO: 14830. In some embodiments, the SpCas9 lacks the N-terminus methionine relative to a corresponding SpCas9 (e.g., a nickase SpCas9, e.g., as set forth in SEQ ID NO: 14830), e.g., as set forth in SEQ ID NO: 14831. In some embodiments, the Cas9 polypeptide comprises a mutation at amino acid H840A as compared to a wild type SpCas9 as set forth in SEQ ID NO: 14829, or a corresponding mutation thereof. In some embodiments, the Cas9 polypeptide comprises a mutation at amino acid H839A as compared to a wild type SpCas9 (as set forth in SEQ ID NO: 14829) lacking a N-terminal methionine, or a corresponding mutation thereof. In some embodiments, the Cas9 polypeptide comprises a mutation at amino acid H839A as compared to a wild type SpCas9 (as set forth in SEQ ID NO: 14970).

[0137] Exemplary Streptococcus pyogenes Cas9 (SpCas9) amino acid sequences useful in the prime editors disclosed herein are provided below in SEQ ID NOs: 14829-14831, 14838-14846, 14853-14855, 14876, 14970-14971, 14972, or 14910.

[0138] In some embodiments, a prime editor comprises a Cas protein, e.g., Cas9 variant, e.g., a Cas protein comprising one or more mutations. In some embodiments, a Cas9 protein comprises a variant Cas9 protein containing one or more amino acid substitutions. An exemplary Cas9 variant comprising one or more mutations comprises an amino acid sequence as set forth in SEQ ID NO. 14876.

[0139] In some embodiments, a prime editor comprises a Cas9 protein as according to any of the SEQ ID NOS 14832-14834 or a variant thereof. In some embodiments, a prime editor comprises a Cas9 protein from Staphylococcus lugdunensis (Slu Cas9) e.g., as according to any of the SEQ ID NOS 14832-14834 or a variant thereof. In some embodiments, a sluCas9 lacks a N-terminal methionine relative to a corresponding sluCas9 (e.g., a wild type sluCas9, a sluCas9 variant, or a nickase sluCas9). In some embodiments, the Cas9 protein is a sluCas9. In some embodiments, a sluCas9 can be a wild type sluCas9, a sluCas9 variant or a nickase sluCas9. In some embodiments, a prime editor comprises a Cas9 protein, having an amino acid sequence as according to SEQ ID NO: 14832, not including the N-terminus methionine. In some embodiments, a prime editor comprises a Cas9 protein, lacking a N-terminus methionine having an amino acid sequence as according to SEQ ID NO: 14973. In some embodiments, a wild type SluCas9 comprises an amino acid sequence set forth in SEQ ID NO: 14832. In some embodiments, a prime editor comprises a Cas9 protein, having an amino acid sequence as according to SEQ ID NO: 14833, not including the N-terminus methionine (e.g., as set forth in SEQ ID NO: 14834). In some embodiments, a prime editor comprises a Cas9 protein comprising one or more mutations (e.g., amino acid substitutions, insertions and/or deletions relative to a corresponding wild type Cas9 protein (e.g., wild type sluCas9). In some embodiments, the Cas9 protein comprising one or mutations relative to a wild type Cas9 protein comprises an amino acid sequence set forth in SEQ ID NOs: 14833 or 14834.

[0140] Exemplary Staphylococcus lugdunensis Cas9 (SluCas9) amino acid sequences useful in the prime editors disclosed herein are provided below in SEQ ID NOs: 14832-14834 or 14973.

[0141] In some embodiments, a prime editor comprises a Cas9 protein from Staphylococcus aureus (SaCas9) e.g., as according to any of the SEQ ID NOS: 14835-14837, or 14974 or a variant thereof. In some embodiments, a SaCas9 may lack a N-terminal methionine. In some embodiments, a SaCas9 may comprise a mutation.

[0142] In some embodiments, a prime editor comprises a Cas9 protein as according to any of the SEQ ID NOS: 14835, 14836, or 14837, 14974, or a variant thereof. In some embodiments, a SaCas9 lacks a N-terminal methionine relative to a corresponding SaCas9 (e.g., a wild type SaCas9, a SaCas9 variant, or a nickase SaCas9). In some embodiments, the Cas9 protein is a SaCas9. In some embodiments, a SaCas9 can be a wild type SaCas9, a SaCas9 variant or a nickase SaCas9. In some embodiments, a prime editor comprises a Cas9 protein, having an amino acid sequence as according to SEQ ID NO: 14835, not including the N-terminus methionine. In some embodiments, a wild type SaCas9 comprises an amino acid sequence set forth in SEQ ID NO: 14835. In some embodiments, a prime editor comprises a Cas9 protein, having an amino acid sequence as according to SEQ ID NO: 14836, not including the N-terminus methionine (e.g., as set forth in SEQ ID NO: 14837). In some embodiments, a prime editor comprises a Cas9 protein, lacking a N-terminus methionine having an amino acid sequence as according to SEQ ID NO: 14974. In some embodiments, a prime editor comprises a Cas9 protein comprising one or more mutations (e.g., amino acid substitutions, insertions and/or deletions relative to a corresponding wild type Cas9 protein (e.g., wild type SaCas9). In some embodiments, the Cas9 protein comprising one or mutations relative to a wild type Cas9 protein comprises an amino acid sequence set forth in SEQ ID NOs: 14836 or 14837. Exemplary SaCas9 amino acid sequences useful in the prime editors disclosed herein are provided in SEQ ID NOs: 14835-14837, or 14974.

[0143] In some embodiments, a Cas9 is a chimeric Cas9, e.g., modified Cas9; e.g., synthetic RNA-guided nucleases (sRGNs), e.g., modified by DNA family shuffling, e.g., sRGN3.1, sRGN3.3. In some embodiments, the DNA family shuffling comprises, fragmentation and reassembly of parental Cas9 genes, e.g., one or more of Cas9s from Staphylococcus hyicus (Shy), Staphylococcus lugdunensis (Slu), Staphylococcus microti (Smi), and Staphylococcus pasteuri (Spa). In some embodiments, a modified sluCas9 shows increased editing efficiency and/or specificity relative to a sluCas9 that is not modified. In some embodiments, a modified Cas9, e.g., a sRGN shows at least 10%, at least 20%, at least 30%, at least 40%, at least 50%, at least 60%, at least 70%, at least 80%, at least 90%, at least 100%, at least 150%, at least 200%, at least 300%, at least 400%, at least 500%, at least 600%, at least 700%, at least 800%, at least 900%, or at least 1000% increase in editing efficiency compared to a Cas9 that is not modified. In some embodiments, a Cas9, e.g., a sRGN shows at least 10%, at least 20%, at least 30%, at least 40%, at least 50%, at least 60%, at least 70%, at least 80%, at least 90%, at least 100%, at least 150%, at least 200%, at least 300%, at least 400%, at least 500%, at least 600%, at least 700%, at least 800%, at least 900%, or at least 1000% increase in specificity compared to a Cas9 that is not modified. In some embodiments, a Cas9, e.g., a sRGN shows at least 10%, at least 20%, at least 30%, at least 40%, at least 50%, at least 60%, at least 70%, at least 80%, at least 90%, at least 100%, at least 150%, at least 200%/, at least 300%/, at least 400%/, at least 500%/, at least 600%/, at least 700%/, at least 800%/, at least 900%/, or at least 1000% increase in cleavage activity compared to a Cas9 that is not modified. In some embodiments, a Cas9, e.g., a sRGN shows ability to cleave a 5′-NNGG-3′ PAM-containing target. In some embodiments, a prime editor may comprise a Cas9 (e.g., a chimeric Cas9), e.g., as according any of the sequences selected from 14847-14852, 14908, or 14909 or a variant thereof. Exemplary amino acid sequences of sRGN useful in the prime editors disclosed herein are provided below in SEQ ID NOs: 14847-14852, 14908, or 14909. In some embodiments, a prime editor comprises a Cas9 protein, lacking a N-terminus methionine having an amino acid sequence as according to SEQ ID NO: 14908. In some embodiments, a prime editor comprises a Cas9 protein, lacking a N-terminus methionine having an amino acid sequence as according to SEQ ID NO: 14909.

TABLE 86
Exemplary Cas sequences

| Sequence | SEQ | |
|---|---|---|
| Descrip- | ID | |
| tion | NO. | Sequence |
| wtSpCas9 | 14829 | MDKKYSIGLDIGTNSVGWAVITDEYKVPSKKFKVLGNTDRHSIKKNLIGALLFDSGETAEATR |
| | | LKRTARRRYTRRKNRICYLQEIFSNEMAKVDDSFFHRLEESFLVEEDKKHERHPIFGNIVDEV |
| | | AYHEKYPTIYHLRKKLVDSTDKADLRLIYLALAHMIKFRGHFLIEGDLNPDNSDVDKLFIQLV |
| | | QTYNQLFEENPINASGVDAKAILSARLSKSRRLENLIAQLPGEKKNGLFGNLIALSLGLTPNF |
| | | KSNFDLAEDAKLQLSKDTYDDDLDNLLAQIGDQYADLFLAAKNLSDAILLSDILRVNTEITKA |
| | | PLSASMIKRYDEHHQDLTLLKALVRQQLPEKYKEIFFDQSKNGYAGYIDGGASQEEFYKFIKP |
| | | ILEKMDGTEELLVKLNREDLLRKQRTFDNGSIPHQIHLGELHAILRRQEDFYPFLKDNREKIE |
| | | KILTFRIPYYVGPLARGNSRFAWMTRKSEETITPWNFEEVVDKGASAQSFIERMTNFDKNLPN |
| | | EKVLPKHSLLYEYFTVYNELTKVKYVTEGMRKPAFLSGEQKKAIVDLLFKTNRKVTVKQLKED |
| | | YFKKIECFDSVEISGVEDRFNASLGTYHDLLKIIKDKDFLDNEENEDILEDIVLTLTLFEDRE |
| | | MIEERLKTYAHLFDDKVMKQLKRRRYTGWGRLSRKLINGIRDKQSGKTILDFLKSDGFANRNF |
| | | MQLIHDDSLTFKEDIQKAQVSGQGDSLHEHIANLAGSPAIKKGILQTVKVVDELVKVMGRHKP |
| | | ENIVIEMARENQTTQKGQKNSRERMKRIEEGIKELGSQILKEHPVENTQLQNEKLYLYYLQNG |
| | | RDMYVDQELDINRLSDYDVDHIVPQSFLKDDSIDNKVLTRSDKNRGKSDNVPSEEVVKKMKNY |
| | | WROLLNAKLITQRKFDNLTKAERGGLSELDKAGFIKRQLVETRQITKHVAQILDSRMNTKYDE |
| | | NDKLIREVKVITLKSKLVSDFRKDFQFYKVREINNYHHAHDAYLNAVVGTALIKKYPKLESEF |
| | | VYGDYKVYDVRKMIAKSEQEIGKATAKYFFYSNIMNFFKTEITLANGEIRKRPLIETNGETGE |
| | | IVWDKGRDFATVRKVLSMPQVNIVKKTEVQTGGFSKESILPKRNSDKLIARKKDWDPKKYGGF |
| | | DSPTVAYSVLVVAKVEKGKSKKLKSVKELLGITIMERSSFEKNPIDFLEAKGYKEVKKDLIIK |
| | | LPKYSLFELENGRKRMLASAGELQKGNELALPSKYVNFLYLASHYEKLKGSPEDNEQKQLFVE |
| | | QHKHYLDEIIEQISEFSKRVILADANLDKVLSAYNKHRDKPIREQAENIIHLFTLTNLGAPAA |
| | | FKYFDTTIDRKRYTSTKEVLDATLIHQSITGLYETRIDLSQLGGD |
| Sp Cas9 | 14830 | MDKKYSIGLDIGTNSVGWAVITDEYKVPSKKFKVLGNTDRHSIKKNLIGALLFDSGETAEATR |
| nickase | | LKRTARRRYTRRKNRICYLQEIFSNEMAKVDDSFFHRLEESFLVEEDKKHERHPIFGNIVDEV |
| H840A | | AYHEKYPTIYHLRKKLVDSTDKADLRLIYLALAHMIKFRGHFLIEGDLNPDNSDVDKLFIQLV |
| | | QTYNQLFEENPINASGVDAKAILSARLSKSRRLENLIAQLPGEKKNGLFGNLIALSLGLTPNF |
| | | KSNFDLAEDAKLQLSKDTYDDDLDNLLAQIGDQYADLFLAAKNLSDAILLSDILRVNTEITKA |
| | | PLSASMIKRYDEHHQDLTLLKALVRQQLPEKYKEIFFDQSKNGYAGYIDGGASQEEFYKFIKP |
| | | ILEKMDGTEELLVKLNREDLLRKQRTFDNGSIPHQIHLGELHAILRRQEDFYPFLKDNREKIE |
| | | KILTFRIPYYVGPLARGNSRFAWMTRKSEETITPWNFEEVVDKGASAQSFIERMTNFDKNLPN |
| | | EKVLPKHSLLYEYFTVYNELTKVKYVTEGMRKPAFLSGEQKKAIVDLLFKTNRKVTVKQLKED |
| | | YFKKIECFDSVEISGVEDRFNASLGTYHDLLKIIKDKDFLDNEENEDILEDIVLTLTLFEDRE |
| | | MIEERLKTYAHLFDDKVMKQLKRRRYTGWGRLSRKLINGIRDKQSGKTILDFLKSDGFANRNF |
| | | MQLIHDDSLTFKEDIQKAQVSGQGDSLHEHIANLAGSPAIKKGILQTVKVVDELVKVMGRHKP |
| | | ENIVIEMARENQTTQKGQKNSRERMKRIEEGIKELGSQILKEHPVENTQLQNEKLYLYYLQNG |
| | | RDMYVDQELDINRLSDYDVDAIVPQSFLKDDSIDNKVLTRSDKNRGKSDNVPSEEVVKKMKNY |
| | | WRQLLNAKLITQRKFDNLTKAERGGLSELDKAGFIKRQLVETRQITKHVAQILDSRMNTKYDE |
| | | NDKLIREVKVITLKSKLVSDFRKDFQFYKVREINNYHHAHDAYLNAVVGTALIKKYPKLESEF |
| | | VYGDYKVYDVRKMIAKSEQEIGKATAKYFFYSNIMNFFKTEITLANGEIRKRPLIETNGETGE |
| | | IVWDKGRDFATVRKVLSMPQVNIVKKTEVQTGGFSKESILPKRNSDKLIARKKDWDPKKYGGF |
| | | DSPTVAYSVLVVAKVEKGKSKKLKSVKELLGITIMERSSFEKNPIDFLEAKGYKEVKKDLIIK |
| | | LPKYSLFELENGRKRMLASAGELQKGNELALPSKYVNFLYLASHYEKLKGSPEDNEQKQLFVE |
| | | QHKHYLDEIIEQISEFSKRVILADANLDKVLSAYNKHRDKPIREQAENIIHLFTLTNLGAPAA |
| | | FKYFDTTIDRKRYTSTKEVLDATLIHQSITGLYETRIDLSQLGGD |
| met- | 14831 | DKKYSIGLDIGTNSVGWAVITDEYKVPSKKFKVLGNTDRHSIKKNLIGALLFDSGETAEATRL |
| Cas9 | | KRTARRRYTRRKNRICYLQEIFSNEMAKVDDSFFHRLEESFLVEEDKKHERHPIFGNIVDEVA |
| nickase | | YHEKYPTIYHLRKKLVDSTDKADLRLIYLALAHMIKFRGHFLIEGDLNPDNSDVDKLFIQLVQ |
| H840A | | TYNQLFEENPINASGVDAKAILSARLSKSRRLENLIAQLPGEKKNGLFGNLIALSLGLTPNFK |
| | | SNFDLAEDAKLQLSKDTYDDDLDNLLAQIGDQYADLFLAAKNLSDAILLSDILRVNTEITKAP |
| | | LSASMIKRYDEHHQDLTLLKALVRQQLPEKYKEIFFDQSKNGYAGYIDGGASQEEFYKFIKPI |
| | | LEKMDGTEELLVKLNREDLLRKQRTFDNGSIPHQIHLGELHAILRRQEDFYPFLKDNREKIEK |
| | | ILTFRIPYYVGPLARGNSRFAWMTRKSEETITPWNFEEVVDKGASAQSFIERMTNFDKNLPNE |
| | | KVLPKHSLLYEYFTVYNELTKVKYVTEGMRKPAFLSGEQKKAIVDLLFKTNRKVTVKQLKEDY |
| | | FKKIECFDSVEISGVEDRFNASLGTYHDLLKIIKDKDFLDNEENEDILEDIVLTLTLFEDREM |
| | | IEERLKTYAHLFDDKVMKQLKRRRYTGWGRLSRKLINGIRDKQSGKTILDFLKSDGFANRNFM |
| | | QLIHDDSLTFKEDIQKAQVSGQGDSLHEHIANLAGSPAIKKGILQTVKVVDELVKVMGRHKPE |
| | | NIVIEMARENQTTQKGQKNSRERMKRIEEGIKELGSQILKEHPVENTQLQNEKLYLYYLQNGR |
| | | DMYVDQELDINRLSDYDVDAIVPQSFLKDDSIDNKVLTRSDKNRGKSDNVPSEEVVKKMKNYW |
| | | RQLLNAKLITQRKFDNLTKAERGGLSELDKAGFIKRQLVETRQITKHVAQILDSRMNTKYDEN |
| | | DKLIREVKVITLKSKLVSDFRKDFQFYKVREINNYHHAHDAYLNAVVGTALIKKYPKLESEFV |
| | | YGDYKVYDVRKMIAKSEQEIGKATAKYFFYSNIMNFFKTEITLANGEIRKRPLIETNGETGEI |
| | | VWDKGRDFATVRKVLSMPQVNIVKKTEVQTGGFSKESILPKRNSDKLIARKKDWDPKKYGGFD |
| | | SPTVAYSVLVVAKVEKGKSKKLKSVKELLGITIMERSSFEKNPIDFLEAKGYKEVKKDLIIKL |
| | | PKYSLFELENGRKRMLASAGELQKGNELALPSKYVNFLYLASHYEKLKGSPEDNEQKQLFVEQ |
| | | HKHYLDEIIEQISEFSKRVILADANLDKVLSAYNKHRDKPIREQAENIIHLFTLTNLGAPAAF |
| | | KYFDTTIDRKRYTSTKEVLDATLIHQSITGLYETRIDLSQLGGD |
| sluCas9 | 14832 | MNQKFILGLDIGITSVGYGLIDYETKNIIDAGVRLFPEANVENNEGRRSKRGSRRLKRRRIHR |
| | | LERVKKLLEDYNLLDQSQIPQSTNPYAIRVKGLSEALSKDELVIALLHIAKRRGIHKIDVIDS |
| | | NDDVGNELSTKEQLNKNSKLLKDKFVCQIQLERMNEGQVRGEKNRFKTADIIKEIIQLLNVQK |
| | | NFHQLDENFINKYIELVEMRREYFEGPGKGSPYGWEGDPKAWYETLMGHCTYFPDELRSVKYA |
| | | YSADLFNALNDLNNLVIQRDGLSKLEYHEKYHIIENVFKQKKKPTLKQIANEINVNPEDIKGY |
| | | RITKSGKPQFTEFKLYHDLKSVLFDQSILENEDVLDQIAEILTIYQDKDSIKSKLTELDILLN |
| | | EEDKENIAQLTGYTGTHRLSLKCIRLVLEEQWYSSRNQMEIFTHLNIKPKKINLTAANKIPKA |
| | | MIDEFILSPVVKRTFGQAINLINKIIEKYGVPEDIIIELARENNSKDKQKFINEMQKKNENTR |
| | | KRINEIIGKYGNQNAKRLVEKIRLHDEQEGKCLYSLESIPLEDLLNNPNHYEVDHIIPRSVSF |
| | | DNSYHNKVLVKQSENSKKSNLTPYQYFNSGKSKLSYNQFKQHILNLSKSQDRISKKKKEYLLE |
| | | ERDINKFEVQKEFINRNLVDTRYATRELTNYLKAYFSANNMNVKVKTINGSFTDYLRKVWKFK |
| | | KERNHGYKHHAEDALIIANADFLFKENKKLKAVNSVLEKPEIESKQLDIQVDSEDNYSEMFII |
| | | PKQVQDIKDFRNFKYSHRVDKKPNRQLINDTLYSTRKKDNSTYIVQTIKDIYAKDNTTLKKQF |
| | | DKSPEKFLMYQHDPRTFEKLEVIMKQYANEKNPLAKYHEETGEYLTKYSKKNNGPIVKSLKYI |
| | | GNKLGSHLDVTHQFKSSTKKLVKLSIKPYRFDVYLTDKGYKFITISYLDVLKKDNYYYIPEQK |
| | | YDKLKLGKAIDKNAKFIASFYKNDLIKLDGEIYKIIGVNSDTRNMIELDLPDIRYKEYCELNN |
| | | IKGEPRIKKTIGKKVNSIEKLTTDVLGNVFTNTQYTKPQLLFKRGN |
| sluCas9 | 14833 | MNQKFILGLDIGITSVGYGLIDYETKNIIDAGVRLFPEANVENNEGRRSKRGSRRLKRRRIHR |
| nickase | | LERVKKLLEDYNLLDQSQIPQSTNPYAIRVKGLSEALSKDELVIALLHIAKRRGIHKIDVIDS |
| | | NDDVGNELSTKEQLNKNSKLLKDKFVCQIQLERMNEGQVRGEKNRFKTADIIKEIIQLLNVQK |
| | | NFHQLDENFINKYIELVEMRREYFEGPGKGSPYGWEGDPKAWYETLMGHCTYFPDELRSVKYA |
| | | YSADLFNALNDLNNLVIQRDGLSKLEYHEKYHIIENVFKQKKKPTLKQIANEINVNPEDIKGY |
| | | RITKSGKPQFTEFKLYHDLKSVLFDQSILENEDVLDQIAEILTIYQDKDSIKSKLTELDILLN |
| | | EEDKENIAQLTGYTGTHRLSLKCIRLVLEEQWYSSRNQMEIFTHLNIKPKKINLTAANKIPKA |
| | | MIDEFILSPVVKRTFGQAINLINKIIEKYGVPEDIIIELARENNSKDKQKFINEMQKKNENTR |
| | | KRINEIIGKYGNQNAKRLVEKIRLHDEQEGKCLYSLESIPLEDLLNNPNHYEVDHIIPRSVSF |
| | | DNSYHNKVLVKQSENSKKSNLTPYQYFNSGKSKLSYNQFKQHILNLSKSQDRISKKKKEYLLE |
| | | ERDINKFEVQKEFINRNLVDTRYATRELTNYLKAYFSANNMNVKVKTINGSFTDYLRKVWKFK |
| | | KERNHGYKHHAEDALIIANADFLFKENKKLKAVNSVLEKPEIESKQLDIQVDSEDNYSEMFII |
| | | PKQVQDIKDFRNFKYSHRVDKKPNRQLINDTLYSTRKKDNSTYIVQTIKDIYAKDNTTLKKQF |
| | | DKSPEKFLMYQHDPRTFEKLEVIMKQYANEKNPLAKYHEETGEYLTKYSKKNNGPIVKSLKYI |
| | | GNKLGSHLDVTHQFKSSTKKLVKLSIKPYRFDVYLTDKGYKFITISYLDVLKKDNYYYIPEQK |
| | | YDKLKLGKAIDKNAKFIASFYKNDLIKLDGEIYKIIGVNSDTRNMIELDLPDIRYKEYCELNN |
| | | IKGEPRIKKTIGKKVNSIEKLTTDVLGNVFTNTQYTKPQLLFKRGN |
| met- | 14834 | NQKFILGLDIGITSVGYGLIDYETKNIIDAGVRLFPEANVENNEGRRSKRGSRRLKRRRIHRL |
| sluCas9 | | ERVKKLLEDYNLLDQSQIPQSTNPYAIRVKGLSEALSKDELVIALLHIAKRRGIHKIDVIDSN |
| nickase | | DDVGNELSTKEQLNKNSKLLKDKFVCQIQLERMNEGQVRGEKNRFKTADIIKEIIQLLNVQKN |
| | | FHQLDENFINKYIELVEMRREYFEGPGKGSPYGWEGDPKAWYETLMGHCTYFPDELRSVKYAY |
| | | SADLFNALNDLNNLVIQRDGLSKLEYHEKYHIIENVFKQKKKPTLKQIANEINVNPEDIKGYR |
| | | ITKSGKPQFTEFKLYHDLKSVLFDQSILENEDVLDQIAEILTIYQDKDSIKSKLTELDILLNE |
| | | EDKENIAQLTGYTGTHRLSLKCIRLVLEEQWYSSRNQMEIFTHLNIKPKKINLTAANKIPKAM |
| | | IDEFILSPVVKRTFGQAINLINKIIEKYGVPEDIIIELARENNSKDKQKFINEMQKKNENTRK |
| | | RINEIIGKYGNQNAKRLVEKIRLHDEQEGKCLYSLESIPLEDLLNNPNHYEVDHIIPRSVSFD |
| | | NSYHNKVLVKQSEASKKSNLTPYQYFNSGKSKLSYNQFKQHILNLSKSQDRISKKKKEYLLEE |
| | | RDINKFEVQKEFINRNLVDTRYATRELTNYLKAYFSANNMNVKVKTINGSFTDYLRKVWKFKK |
| | | ERNHGYKHHAEDALIIANADFLFKENKKLKAVNSVLEKPEIESKQLDIQVDSEDNYSEMFIIP |
| | | KQVQDIKDFRNFKYSHRVDKKPNRQLINDTLYSTRKKDNSTYIVQTIKDIYAKDNTTLKKQFD |
| | | KSPEKFLMYQHDPRTFEKLEVIMKQYANEKNPLAKYHEETGEYLTKYSKKNNGPIVKSLKYIG |
| | | NKLGSHLDVTHQFKSSTKKLVKLSIKPYRFDVYLTDKGYKFITISYLDVLKKDNYYYIPEQKY |
| | | DKLKLGKAIDKNAKFIASFYKNDLIKLDGEIYKIIGVNSDTRNMIELDLPDIRYKEYCELNNI |
| | | KGEPRIKKTIGKKVNSIEKLTTDVLGNVFTNTQYTKPQLLFKRGN |
| saCas9 | 14835 | MKRNYILGLDIGITSVGYGIIDYETRDVIDAGVRLFKEANVENNEGRRSKRGARRLKRRRRHR |
| | | IQRVKKLLFDYNLLTDHSELSGINPYEARVKGLSQKLSEEEFSAALLHLAKRRGVHNVNEVEE |
| | | DTGNELSTKEQISRNSKALEEKYVAELQLERLKKDGEVRGSINRFKTSDYVKEAKQLLKVQKA |
| | | YHQLDQSFIDTYIDLLETRRTYYEGPGEGSPFGWKDIKEWYEMLMGHCTYFPEELRSVKYAYN |
| | | ADLYNALNDLNNLVITRDENEKLEYYEKFQIIENVFKQKKKPTLKQIAKEILVNEEDIKGYRV |
| | | TSTGKPEFTNLKVYHDIKDITARKEIIENAELLDQIAKILTIYQSSEDIQEELTNLNSELTQE |
| | | EIEQISNLKGYTGTHNLSLKAINLILDELWHTNDNQIAIFNRLKLVPKKVDLSQQKEIPTTLV |
| | | DDFILSPVVKRSFIQSIKVINAIIKKYGLPNDIIIELAREKNSKDAQKMINEMQKRNRQTNER |
| | | IEEIIRTTGKENAKYLIEKIKLHDMQEGKCLYSLEAIPLEDLLNNPFNYEVDHIIPRSVSFDN |
| | | SFNNKVLVKQEENSKKGNRTPFQYLSSSDSKISYETFKKHILNLAKGKGRISKTKKEYLLEER |
| | | DINRFSVQKDFINRNLVDTRYATRGLMNLLRSYFRVNNLDVKVKSINGGFTSFLRRKWKFKKE |
| | | RNKGYKHHAEDALIIANADFIFKEWKKLDKAKKVMENQMFEEKQAESMPEIETEQEYKEIFIT |
| | | PHQIKHIKDFKDYKYSHRVDKKPNRELINDTLYSTRKDDKGNTLIVNNLNGLYDKDNDKLKKL |
| | | INKSPEKLLMYHHDPQTYQKLKLIMEQYGDEKNPLYKYYEETGNYLTKYSKKDNGPVIKKIKY |
| | | YGNKLNAHLDITDDYPNSRNKVVKLSLKPYRFDVYLDNGVYKFVTVKNLDVIKKENYYEVNSK |
| | | CYEEAKKLKKISNQAEFIASFYNNDLIKINGELYRVIGVNNDLLNRIEVNMIDITYREYLENM |
| | | NDKRPPRIIKTIASKTQSIKKYSTDILGNLYEVKSKKHPQIIKKG |
| SaCas9 | 14836 | MKRNYILGLDIGITSVGYGIIDYETRDVIDAGVRLFKEANVENNEGRRSKRGARRLKRRRRHR |
| (N580A) | | IQRVKKLLFDYNLLTDHSELSGINPYEARVKGLSQKLSEEEFSAALLHLAKRRGVHNVNEVEE |
| nickase | | DTGNELSTKEQISRNSKALEEKYVAELQLERLKKDGEVRGSINRFKTSDYVKEAKQLLKVQKA |
| | | YHQLDQSFIDTYIDLLETRRTYYEGPGEGSPFGWKDIKEWYEMLMGHCTYFPEELRSVKYAYN |
| | | ADLYNALNDLNNLVITRDENEKLEYYEKFQIIENVFKQKKKPTLKQIAKEILVNEEDIKGYRV |
| | | TSTGKPEFTNLKVYHDIKDITARKEIIENAELLDQIAKILTIYQSSEDIQEELTNLNSELTQE |
| | | EIEQISNLKGYTGTHNLSLKAINLILDELWHTNDNQIAIFNRLKLVPKKVDLSQQKEIPTTLV |
| | | DDFILSPVVKRSFIQSIKVINAIIKKYGLPNDIIIELAREKNSKDAQKMINEMQKRNRQTNER |
| | | IEEIIRTTGKENAKYLIEKIKLHDMQEGKCLYSLEAIPLEDLLNNPFNYEVDHIIPRSVSFDN |
| | | SFNNKVLVKQEEASKKGNRTPFQYLSSSDSKISYETFKKHILNLAKGKGRISKTKKEYLLEER |
| | | DINRFSVQKDFINRNLVDTRYATRGLMNLLRSYFRVNNLDVKVKSINGGFTSFLRRKWKFKKE |
| | | RNKGYKHHAEDALIIANADFIFKEWKKLDKAKKVMENQMFEEKQAESMPEIETEQEYKEIFIT |
| | | PHQIKHIKDFKDYKYSHRVDKKPNRELINDTLYSTRKDDKGNTLIVNNLNGLYDKDNDKLKKL |
| | | INKSPEKLLMYHHDPQTYQKLKLIMEQYGDEKNPLYKYYEETGNYLTKYSKKDNGPVIKKIKY |
| | | YGNKLNAHLDITDDYPNSRNKVVKLSLKPYRFDVYLDNGVYKFVTVKNLDVIKKENYYEVNSK |
| | | CYEEAKKLKKISNQAEFIASFYNNDLIKINGELYRVIGVNNDLLNRIEVNMIDITYREYLENM |
| | | NDKRPPRIIKTIASKTQSIKKYSTDILGNLYEVKSKKHPQIIKKG |
| met- | 14837 | KRNYILGLDIGITSVGYGIIDYETRDVIDAGVRLFKEANVENNEGRRSKRGARRLKRRRRHRI |
| SaCas9 | | QRVKKLLFDYNLLTDHSELSGINPYEARVKGLSQKLSEEEFSAALLHLAKRRGVHNVNEVEED |
| (N579A) | | TGNELSTKEQISRNSKALEEKYVAELQLERLKKDGEVRGSINRFKTSDYVKEAKQLLKVQKAY |
| nickase | | HQLDQSFIDTYIDLLETRRTYYEGPGEGSPFGWKDIKEWYEMLMGHCTYFPEELRSVKYAYNA |
| | | DLYNALNDLNNLVITRDENEKLEYYEKFQIIENVFKQKKKPTLKQIAKEILVNEEDIKGYRVT |
| | | STGKPEFTNLKVYHDIKDITARKEIIENAELLDQIAKILTIYQSSEDIQEELTNLNSELTQEE |
| | | IEQISNLKGYTGTHNLSLKAINLILDELWHTNDNQIAIFNRLKLVPKKVDLSQQKEIPTTLVD |
| | | DFILSPVVKRSFIQSIKVINAIIKKYGLPNDIIIELAREKNSKDAQKMINEMQKRNRQTNERI |
| | | EEIIRTTGKENAKYLIEKIKLHDMQEGKCLYSLEAIPLEDLLNNPFNYEVDHIIPRSVSFDNS |
| | | FNNKVLVKQEEASKKGNRTPFQYLSSSDSKISYETFKKHILNLAKGKGRISKTKKEYLLEERD |
| | | INRFSVQKDFINRNLVDTRYATRGLMNLLRSYFRVNNLDVKVKSINGGFTSFLRRKWKFKKER |
| | | NKGYKHHAEDALIIANADFIFKEWKKLDKAKKVMENQMFEEKQAESMPEIETEQEYKEIFITP |
| | | HQIKHIKDFKDYKYSHRVDKKPNRELINDTLYSTRKDDKGNTLIVNNLNGLYDKDNDKLKKLI |
| | | NKSPEKLLMYHHDPQTYQKLKLIMEQYGDEKNPLYKYYEETGNYLTKYSKKDNGPVIKKIKYY |
| | | GNKLNAHLDITDDYPNSRNKVVKLSLKPYRFDVYLDNGVYKFVTVKNLDVIKKENYYEVNSKC |
| | | YEEAKKLKKISNQAEFIASFYNNDLIKINGELYRVIGVNNDLLNRIEVNMIDITYREYLENMN |
| | | DKRPPRIIKTIASKTQSIKKYSTDILGNLYEVKSKKHPQIIKKG |
| spCas9 | 14838 | MDKKYSIGLDIGTNSVGWAVITDEYKVPSKKFKVLGNTDRHSIKKNLIGALLFDSGETAEATR |
| NG | | LKRTARRRYTRRKNRICYLQEIFSNEMAKVDDSFFHRLEESFLVEEDKKHERHPIFGNIVDEV |
| | | AYHEKYPTIYHLRKKLVDSTDKADLRLIYLALAHMIKFRGHFLIEGDLNPDNSDVDKLFIQLV |
| | | QTYNQLFEENPINASGVDAKAILSARLSKSRRLENLIAQLPGEKKNGLFGNLIALSLGLTPNF |
| | | KSNFDLAEDAKLQLSKDTYDDDLDNLLAQIGDQYADLFLAAKNLSDAILLSDILRVNTEITKA |
| | | PLSASMIKRYDEHHQDLTLLKALVRQQLPEKYKEIFFDQSKNGYAGYIDGGASQEEFYKFIKP |
| | | ILEKMDGTEELLVKLNREDLLRKQRTFDNGSIPHQIHLGELHAILRRQEDFYPFLKDNREKIE |
| | | KILTFRIPYYVGPLARGNSRFAWMTRKSEETITPWNFEEVVDKGASAQSFIERMTNFDKNLPN |
| | | EKVLPKHSLLYEYFTVYNELTKVKYVTEGMRKPAFLSGEQKKAIVDLLFKTNRKVTVKQLKED |
| | | YFKKIECFDSVEISGVEDRFNASLGTYHDLLKIIKDKDFLDNEENEDILEDIVLTLTLFEDRE |
| | | MIEERLKTYAHLFDDKVMKQLKRRRYTGWGRLSRKLINGIRDKQSGKTILDFLKSDGFANRNF |
| | | MQLIHDDSLTFKEDIQKAQVSGQGDSLHEHIANLAGSPAIKKGILQTVKVVDELVKVMGRHKP |
| | | ENIVIEMARENQTTQKGQKNSRERMKRIEEGIKELGSQILKEHPVENTQLQNEKLYLYYLQNG |
| | | RDMYVDQELDINRLSDYDVDHIVPQSFLKDDSIDNKVLTRSDKNRGKSDNVPSEEVVKKMKNY |
| | | WRQLLNAKLITQRKFDNLTKAERGGLSELDKAGFIKRQLVETRQITKHVAQILDSRMNTKYDE |
| | | NDKLIREVKVITLKSKLVSDFRKDFQFYKVREINNYHHAHDAYLNAVVGTALIKKYPKLESEF |
| | | VYGDYKVYDVRKMIAKSEQEIGKATAKYFFYSNIMNFFKTEITLANGEIRKRPLIETNGETGE |
| | | IVWDKGRDFATVRKVLSMPQVNIVKKTEVQTGGFSKESIRPKRNSDKLIARKKDWDPKKYGGF |
| | | VSPTVAYSVLVVAKVEKGKSKKLKSVKELLGITIMERSSFEKNPIDFLEAKGYKEVKKDLIIK |
| | | LPKYSLFELENGRKRMLASARFLQKGNELALPSKYVNFLYLASHYEKLKGSPEDNEQKQLFVE |
| | | QHKHYLDEIIEQISEFSKRVILADANLDKVLSAYNKHRDKPIREQAENIIHLFTLTNLGAPRA |
| | | FKYFDTTIDRKVYRSTKEVLDATLIHQSITGLYETRIDLSQLGGD |
| spCas9 | 14839 | MDKKYSIGLDIGTNSVGWAVITDEYKVPSKKFKVLGNTDRHSIKKNLIGALLFDSGETAEATR |
| NG | | LKRTARRRYTRRKNRICYLQEIFSNEMAKVDDSFFHRLEESFLVEEDKKHERHPIFGNIVDEV |
| nickase | | AYHEKYPTIYHLRKKLVDSTDKADLRLIYLALAHMIKFRGHFLIEGDLNPDNSDVDKLFIQLV |
| | | QTYNQLFEENPINASGVDAKAILSARLSKSRRLENLIAQLPGEKKNGLFGNLIALSLGLTPNF |
| | | KSNFDLAEDAKLQLSKDTYDDDLDNLLAQIGDQYADLFLAAKNLSDAILLSDILRVNTEITKA |
| | | PLSASMIKRYDEHHQDLTLLKALVRQQLPEKYKEIFFDQSKNGYAGYIDGGASQEEFYKFIKP |
| | | ILEKMDGTEELLVKLNREDLLRKQRTFDNGSIPHQIHLGELHAILRRQEDFYPFLKDNREKIE |
| | | KILTFRIPYYVGPLARGNSRFAWMTRKSEETITPWNFEEVVDKGASAQSFIERMTNFDKNLPN |
| | | EKVLPKHSLLYEYFTVYNELTKVKYVTEGMRKPAFLSGEQKKAIVDLLFKTNRKVTVKQLKED |
| | | YFKKIECFDSVEISGVEDRFNASLGTYHDLLKIIKDKDFLDNEENEDILEDIVLTLTLFEDRE |
| | | MIEERLKTYAHLFDDKVMKQLKRRRYTGWGRLSRKLINGIRDKQSGKTILDFLKSDGFANRNF |
| | | MQLIHDDSLTFKEDIQKAQVSGQGDSLHEHIANLAGSPAIKKGILQTVKVVDELVKVMGRHKP |
| | | ENIVIEMARENQTTQKGQKNSRERMKRIEEGIKELGSQILKEHPVENTQLQNEKLYLYYLQNG |
| | | RDMYVDQELDINRLSDYDVDAIVPQSFLKDDSIDNKVLTRSDKNRGKSDNVPSEEVVKKMKNY |
| | | WRQLLNAKLITQRKFDNLTKAERGGLSELDKAGFIKRQLVETRQITKHVAQILDSRMNTKYDE |
| | | NDKLIREVKVITLKSKLVSDFRKDFQFYKVREINNYHHAHDAYLNAVVGTALIKKYPKLESEF |
| | | VYGDYKVYDVRKMIAKSEQEIGKATAKYFFYSNIMNFFKTEITLANGEIRKRPLIETNGETGE |
| | | IVWDKGRDFATVRKVLSMPQVNIVKKTEVQTGGFSKESIRPKRNSDKLIARKKDWDPKKYGGF |
| | | VSPTVAYSVLVVAKVEKGKSKKLKSVKELLGITIMERSSFEKNPIDFLEAKGYKEVKKDLIIK |
| | | LPKYSLFELENGRKRMLASARFLQKGNELALPSKYVNFLYLASHYEKLKGSPEDNEQKQLFVE |
| | | QHKHYLDEIIEQISEFSKRVILADANLDKVLSAYNKHRDKPIREQAENIIHLFTLTNLGAPRA |
| | | FKYFDTTIDRKVYRSTKEVLDATLIHQSITGLYETRIDLSQLGGD |
| Met- | 14840 | DKKYSIGLDIGTNSVGWAVITDEYKVPSKKFKVLGNTDRHSIKKNLIGALLFDSGETAEATRL |
| spCas9 | | KRTARRRYTRRKNRICYLQEIFSNEMAKVDDSFFHRLEESFLVEEDKKHERHPIFGNIVDEVA |
| NG | | YHEKYPTIYHLRKKLVDSTDKADLRLIYLALAHMIKFRGHFLIEGDLNPDNSDVDKLFIQLVQ |
| nickase | | TYNQLFEENPINASGVDAKAILSARLSKSRRLENLIAQLPGEKKNGLFGNLIALSLGLTPNFK |
| | | SNFDLAEDAKLQLSKDTYDDDLDNLLAQIGDQYADLFLAAKNLSDAILLSDILRVNTEITKAP |
| | | LSASMIKRYDEHHQDLTLLKALVRQQLPEKYKEIFFDQSKNGYAGYIDGGASQEEFYKFIKPI |
| | | LEKMDGTEELLVKLNREDLLRKQRTFDNGSIPHQIHLGELHAILRRQEDFYPFLKDNREKIEK |
| | | ILTFRIPYYVGPLARGNSRFAWMTRKSEETITPWNFEEVVDKGASAQSFIERMTNFDKNLPNE |
| | | KVLPKHSLLYEYFTVYNELTKVKYVTEGMRKPAFLSGEQKKAIVDLLFKTNRKVTVKQLKEDY |
| | | FKKIECFDSVEISGVEDRFNASLGTYHDLLKIIKDKDFLDNEENEDILEDIVLTLTLFEDREM |
| | | IEERLKTYAHLFDDKVMKQLKRRRYTGWGRLSRKLINGIRDKQSGKTILDFLKSDGFANRNFM |
| | | QLIHDDSLTFKEDIQKAQVSGQGDSLHEHIANLAGSPAIKKGILQTVKVVDELVKVMGRHKPE |
| | | NIVIEMARENQTTQKGQKNSRERMKRIEEGIKELGSQILKEHPVENTQLQNEKLYLYYLQNGR |
| | | DMYVDQELDINRLSDYDVDAIVPQSFLKDDSIDNKVLTRSDKNRGKSDNVPSEEVVKKMKNYW |
| | | RQLLNAKLITQRKFDNLTKAERGGLSELDKAGFIKRQLVETRQITKHVAQILDSRMNTKYDEN |
| | | DKLIREVKVITLKSKLVSDFRKDFQFYKVREINNYHHAHDAYLNAVVGTALIKKYPKLESEFV |
| | | YGDYKVYDVRKMIAKSEQEIGKATAKYFFYSNIMNFFKTEITLANGEIRKRPLIETNGETGEI |
| | | VWDKGRDFATVRKVLSMPQVNIVKKTEVQTGGFSKESIRPKRNSDKLIARKKDWDPKKYGGFV |
| | | SPTVAYSVLVVAKVEKGKSKKLKSVKELLGITIMERSSFEKNPIDFLEAKGYKEVKKDLIIKL |
| | | PKYSLFELENGRKRMLASARFLQKGNELALPSKYVNFLYLASHYEKLKGSPEDNEQKQLFVEQ |
| | | HKHYLDEIIEQISEFSKRVILADANLDKVLSAYNKHRDKPIREQAENIIHLFTLTNLGAPRAF |
| | | KYFDTTIDRKVYRSTKEVLDATLIHQSITGLYETRIDLSQLGGD |
| spCas9 | 14841 | MDKKYSIGLDIGTNSVGWAVITDEYKVPSKKFKVLGNTDRHSIKKNLIGALLFDSGETAEATR |
| VRQR | | LKRTARRRYTRRKNRICYLQEIFSNEMAKVDDSFFHRLEESFLVEEDKKHERHPIFGNIVDEV |
| | | AYHEKYPTIYHLRKKLVDSTDKADLRLIYLALAHMIKFRGHFLIEGDLNPDNSDVDKLFIQLV |
| | | QTYNQLFEENPINASGVDAKAILSARLSKSRRLENLIAQLPGEKKNGLFGNLIALSLGLTPNF |
| | | KSNFDLAEDAKLQLSKDTYDDDLDNLLAQIGDQYADLFLAAKNLSDAILLSDILRVNTEITKA |
| | | PLSASMIKRYDEHHQDLTLLKALVRQQLPEKYKEIFFDQSKNGYAGYIDGGASQEEFYKFIKP |
| | | ILEKMDGTEELLVKLNREDLLRKQRTFDNGSIPHQIHLGELHAILRRQEDFYPFLKDNREKIE |
| | | KILTFRIPYYVGPLARGNSRFAWMTRKSEETITPWNFEEVVDKGASAQSFIERMTNFDKNLPN |
| | | EKVLPKHSLLYEYFTVYNELTKVKYVTEGMRKPAFLSGEQKKAIVDLLFKTNRKVTVKQLKED |
| | | YFKKIECFDSVEISGVEDRFNASLGTYHDLLKIIKDKDFLDNEENEDILEDIVLTLTLFEDRE |
| | | MIEERLKTYAHLFDDKVMKQLKRRRYTGWGRLSRKLINGIRDKQSGKTILDFLKSDGFANRNF |
| | | MQLIHDDSLTFKEDIQKAQVSGQGDSLHEHIANLAGSPAIKKGILQTVKVVDELVKVMGRHKP |
| | | ENIVIEMARENQTTQKGQKNSRERMKRIEEGIKELGSQILKEHPVENTQLQNEKLYLYYLQNG |
| | | RDMYVDQELDINRLSDYDVDHIVPQSFLKDDSIDNKVLTRSDKNRGKSDNVPSEEVVKKMKNY |
| | | WROLLNAKLITQRKFDNLTKAERGGLSELDKAGFIKRQLVETRQITKHVAQILDSRMNTKYDE |
| | | NDKLIREVKVITLKSKLVSDFRKDFQFYKVREINNYHHAHDAYLNAVVGTALIKKYPKLESEF |
| | | VYGDYKVYDVRKMIAKSEQEIGKATAKYFFYSNIMNFFKTEITLANGEIRKRPLIETNGETGE |
| | | IVWDKGRDFATVRKVLSMPQVNIVKKTEVQTGGFSKESILPKRNSDKLIARKKDWDPKKYGGF |
| | | VSPTVAYSVLVVAKVEKGKSKKLKSVKELLGITIMERSSFEKNPIDFLEAKGYKEVKKDLIIK |
| | | LPKYSLFELENGRKRMLASARELQKGNELALPSKYVNFLYLASHYEKLKGSPEDNEQKQLFVE |
| | | QHKHYLDEIIEQISEFSKRVILADANLDKVLSAYNKHRDKPIREQAENIIHLFTLTNLGAPAA |
| | | FKYFDTTIDRKQYRSTKEVLDATLIHQSITGLYETRIDLSQLGGD |
| spCas9 | 14842 | MDKKYSIGLDIGTNSVGWAVITDEYKVPSKKFKVLGNTDRHSIKKNLIGALLFDSGETAEATR |
| VRQR | | LKRTARRRYTRRKNRICYLQEIFSNEMAKVDDSFFHRLEESFLVEEDKKHERHPIFGNIVDEV |
| nickase | | AYHEKYPTIYHLRKKLVDSTDKADLRLIYLALAHMIKFRGHFLIEGDLNPDNSDVDKLFIQLV |
| | | QTYNQLFEENPINASGVDAKAILSARLSKSRRLENLIAQLPGEKKNGLFGNLIALSLGLTPNF |
| | | KSNFDLAEDAKLQLSKDTYDDDLDNLLAQIGDQYADLFLAAKNLSDAILLSDILRVNTEITKA |
| | | PLSASMIKRYDEHHQDLTLLKALVRQQLPEKYKEIFFDQSKNGYAGYIDGGASQEEFYKFIKP |
| | | ILEKMDGTEELLVKLNREDLLRKQRTFDNGSIPHQIHLGELHAILRRQEDFYPFLKDNREKIE |
| | | KILTFRIPYYVGPLARGNSRFAWMTRKSEETITPWNFEEVVDKGASAQSFIERMTNFDKNLPN |
| | | EKVLPKHSLLYEYFTVYNELTKVKYVTEGMRKPAFLSGEQKKAIVDLLFKTNRKVTVKQLKED |
| | | YFKKIECFDSVEISGVEDRFNASLGTYHDLLKIIKDKDFLDNEENEDILEDIVLTLTLFEDRE |
| | | MIEERLKTYAHLFDDKVMKQLKRRRYTGWGRLSRKLINGIRDKQSGKTILDFLKSDGFANRNF |
| | | MQLIHDDSLTFKEDIQKAQVSGQGDSLHEHIANLAGSPAIKKGILQTVKVVDELVKVMGRHKP |
| | | ENIVIEMARENQTTQKGQKNSRERMKRIEEGIKELGSQILKEHPVENTQLQNEKLYLYYLQNG |
| | | RDMYVDQELDINRLSDYDVDAIVPQSFLKDDSIDNKVLTRSDKNRGKSDNVPSEEVVKKMKNY |
| | | WROLLNAKLITQRKFDNLTKAERGGLSELDKAGFIKRQLVETRQITKHVAQILDSRMNTKYDE |
| | | NDKLIREVKVITLKSKLVSDFRKDFQFYKVREINNYHHAHDAYLNAVVGTALIKKYPKLESEF |
| | | VYGDYKVYDVRKMIAKSEQEIGKATAKYFFYSNIMNFFKTEITLANGEIRKRPLIETNGETGE |
| | | IVWDKGRDFATVRKVLSMPQVNIVKKTEVQTGGFSKESILPKRNSDKLIARKKDWDPKKYGGF |
| | | VSPTVAYSVLVVAKVEKGKSKKLKSVKELLGITIMERSSFEKNPIDFLEAKGYKEVKKDLIIK |
| | | LPKYSLFELENGRKRMLASARELQKGNELALPSKYVNFLYLASHYEKLKGSPEDNEQKQLFVE |
| | | QHKHYLDEIIEQISEFSKRVILADANLDKVLSAYNKHRDKPIREQAENIIHLFTLTNLGAPAA |
| | | FKYFDTTIDRKQYRSTKEVLDATLIHQSITGLYETRIDLSQLGGD |
| met- | 14843 | DKKYSIGLDIGTNSVGWAVITDEYKVPSKKFKVLGNTDRHSIKKNLIGALLFDSGETAEATRL |
| spCas9 | | KRTARRRYTRRKNRICYLQEIFSNEMAKVDDSFFHRLEESFLVEEDKKHERHPIFGNIVDEVA |
| VRQR | | YHEKYPTIYHLRKKLVDSTDKADLRLIYLALAHMIKFRGHFLIEGDLNPDNSDVDKLFIQLVQ |
| | | TYNQLFEENPINASGVDAKAILSARLSKSRRLENLIAQLPGEKKNGLFGNLIALSLGLTPNFK |
| | | SNFDLAEDAKLQLSKDTYDDDLDNLLAQIGDQYADLFLAAKNLSDAILLSDILRVNTEITKAP |
| | | LSASMIKRYDEHHQDLTLLKALVRQQLPEKYKEIFFDQSKNGYAGYIDGGASQEEFYKFIKPI |
| | | LEKMDGTEELLVKLNREDLLRKQRTFDNGSIPHQIHLGELHAILRRQEDFYPFLKDNREKIEK |
| | | ILTFRIPYYVGPLARGNSRFAWMTRKSEETITPWNFEEVVDKGASAQSFIERMTNFDKNLPNE |
| | | KVLPKHSLLYEYFTVYNELTKVKYVTEGMRKPAFLSGEQKKAIVDLLFKTNRKVTVKQLKEDY |
| | | FKKIECFDSVEISGVEDRFNASLGTYHDLLKIIKDKDFLDNEENEDILEDIVLTLTLFEDREM |
| | | IEERLKTYAHLFDDKVMKQLKRRRYTGWGRLSRKLINGIRDKQSGKTILDFLKSDGFANRNFM |
| | | QLIHDDSLTFKEDIQKAQVSGQGDSLHEHIANLAGSPAIKKGILQTVKVVDELVKVMGRHKPE |
| | | NIVIEMARENQTTQKGQKNSRERMKRIEEGIKELGSQILKEHPVENTQLQNEKLYLYYLQNGR |
| | | DMYVDQELDINRLSDYDVDAIVPQSFLKDDSIDNKVLTRSDKNRGKSDNVPSEEVVKKMKNYW |
| | | RQLLNAKLITQRKFDNLTKAERGGLSELDKAGFIKRQLVETRQITKHVAQILDSRMNTKYDEN |
| | | DKLIREVKVITLKSKLVSDFRKDFQFYKVREINNYHHAHDAYLNAVVGTALIKKYPKLESEFV |
| | | YGDYKVYDVRKMIAKSEQEIGKATAKYFFYSNIMNFFKTEITLANGEIRKRPLIETNGETGEI |
| | | VWDKGRDFATVRKVLSMPQVNIVKKTEVQTGGFSKESILPKRNSDKLIARKKDWDPKKYGGFV |
| | | SPTVAYSVLVVAKVEKGKSKKLKSVKELLGITIMERSSFEKNPIDFLEAKGYKEVKKDLIIKL |
| | | PKYSLFELENGRKRMLASARELQKGNELALPSKYVNFLYLASHYEKLKGSPEDNEQKQLFVEQ |
| | | HKHYLDEIIEQISEFSKRVILADANLDKVLSAYNKHRDKPIREQAENIIHLFTLTNLGAPAAF |
| | | KYFDTTIDRKQYRSTKEVLDATLIHQSITGLYETRIDLSQLGGD |
| SpRY | 14844 | MDKKYSIGLDIGTNSVGWAVITDEYKVPSKKFKVLGNTDRHSIKKNLIGALLFDSGETAERTR |
| | | LKRTARRRYTRRKNRICYLQEIFSNEMAKVDDSFFHRLEESFLVEEDKKHERHPIFGNIVDEV |
| | | AYHEKYPTIYHLRKKLVDSTDKADLRLIYLALAHMIKFRGHFLIEGDLNPDNSDVDKLFIQLV |
| | | QTYNQLFEENPINASGVDAKAILSARLSKSRRLENLIAQLPGEKKNGLFGNLIALSLGLTPNF |
| | | KSNFDLAEDAKLQLSKDTYDDDLDNLLAQIGDQYADLFLAAKNLSDAILLSDILRVNTEITKA |
| | | PLSASMIKRYDEHHQDLTLLKALVRQQLPEKYKEIFFDQSKNGYAGYIDGGASQEEFYKFIKP |
| | | ILEKMDGTEELLVKLNREDLLRKQRTFDNGSIPHQIHLGELHAILRRQEDFYPFLKDNREKIE |
| | | KILTFRIPYYVGPLARGNSRFAWMTRKSEETITPWNFEEVVDKGASAQSFIERMTNFDKNLPN |
| | | EKVLPKHSLLYEYFTVYNELTKVKYVTEGMRKPAFLSGEQKKAIVDLLFKTNRKVTVKQLKED |
| | | YFKKIECFDSVEISGVEDRFNASLGTYHDLLKIIKDKDFLDNEENEDILEDIVLTLTLFEDRE |
| | | MIEERLKTYAHLFDDKVMKQLKRRRYTGWGRLSRKLINGIRDKQSGKTILDFLKSDGFANRNF |
| | | MQLIHDDSLTFKEDIQKAQVSGQGDSLHEHIANLAGSPAIKKGILQTVKVVDELVKVMGRHKP |
| | | ENIVIEMARENQTTQKGQKNSRERMKRIEEGIKELGSQILKEHPVENTQLQNEKLYLYYLQNG |
| | | RDMYVDQELDINRLSDYDVDHIVPQSFLKDDSIDNKVLTRSDKNRGKSDNVPSEEVVKKMKNY |
| | | WRQLLNAKLITQRKFDNLTKAERGGLSELDKAGFIKRQLVETRQITKHVAQILDSRMNTKYDE |
| | | NDKLIREVKVITLKSKLVSDFRKDFQFYKVREINNYHHAHDAYLNAVVGTALIKKYPKLESEF |
| | | VYGDYKVYDVRKMIAKSEQEIGKATAKYFFYSNIMNFFKTEITLANGEIRKRPLIETNGETGE |
| | | IVWDKGRDFATVRKVLSMPQVNIVKKTEVQTGGFSKESIRPKRNSDKLIARKKDWDPKKYGGF |
| | | LWPTVAYSVLVVAKVEKGKSKKLKSVKELLGITIMERSSFEKNPIDFLEAKGYKEVKKDLIIK |
| | | LPKYSLFELENGRKRMLASAKQLQKGNELALPSKYVNFLYLASHYEKLKGSPEDNEQKQLFVE |
| | | QHKHYLDEIIEQISEFSKRVILADANLDKVLSAYNKHRDKPIREQAENIIHLFTLTRLGAPRA |
| | | FKYFDTTIDPKQYRSTKEVLDATLIHQSITGLYETRIDLSQLGGD |
| SpRY | 14845 | MDKKYSIGLDIGTNSVGWAVITDEYKVPSKKFKVLGNTDRHSIKKNLIGALLFDSGETAERTR |
| nickase | | LKRTARRRYTRRKNRICYLQEIFSNEMAKVDDSFFHRLEESFLVEEDKKHERHPIFGNIVDEV |
| | | AYHEKYPTIYHLRKKLVDSTDKADLRLIYLALAHMIKFRGHFLIEGDLNPDNSDVDKLFIQLV |
| | | QTYNQLFEENPINASGVDAKAILSARLSKSRRLENLIAQLPGEKKNGLFGNLIALSLGLTPNF |
| | | KSNFDLAEDAKLQLSKDTYDDDLDNLLAQIGDQYADLFLAAKNLSDAILLSDILRVNTEITKA |
| | | PLSASMIKRYDEHHQDLTLLKALVRQQLPEKYKEIFFDQSKNGYAGYIDGGASQEEFYKFIKP |
| | | ILEKMDGTEELLVKLNREDLLRKQRTFDNGSIPHQIHLGELHAILRRQEDFYPFLKDNREKIE |
| | | KILTFRIPYYVGPLARGNSRFAWMTRKSEETITPWNFEEVVDKGASAQSFIERMTNFDKNLPN |
| | | EKVLPKHSLLYEYFTVYNELTKVKYVTEGMRKPAFLSGEQKKAIVDLLFKTNRKVTVKQLKED |
| | | YFKKIECFDSVEISGVEDRFNASLGTYHDLLKIIKDKDFLDNEENEDILEDIVLTLTLFEDRE |
| | | MIEERLKTYAHLFDDKVMKQLKRRRYTGWGRLSRKLINGIRDKQSGKTILDFLKSDGFANRNF |
| | | MQLIHDDSLTFKEDIQKAQVSGQGDSLHEHIANLAGSPAIKKGILQTVKVVDELVKVMGRHKP |
| | | ENIVIEMARENQTTQKGQKNSRERMKRIEEGIKELGSQILKEHPVENTQLQNEKLYLYYLQNG |
| | | RDMYVDQELDINRLSDYDVDAIVPQSFLKDDSIDNKVLTRSDKNRGKSDNVPSEEVVKKMKNY |
| | | WRQLLNAKLITQRKFDNLTKAERGGLSELDKAGFIKRQLVETRQITKHVAQILDSRMNTKYDE |
| | | NDKLIREVKVITLKSKLVSDFRKDFQFYKVREINNYHHAHDAYLNAVVGTALIKKYPKLESEF |
| | | VYGDYKVYDVRKMIAKSEQEIGKATAKYFFYSNIMNFFKTEITLANGEIRKRPLIETNGETGE |
| | | IVWDKGRDFATVRKVLSMPQVNIVKKTEVQTGGFSKESIRPKRNSDKLIARKKDWDPKKYGGF |
| | | LWPTVAYSVLVVAKVEKGKSKKLKSVKELLGITIMERSSFEKNPIDFLEAKGYKEVKKDLIIK |
| | | LPKYSLFELENGRKRMLASAKQLQKGNELALPSKYVNFLYLASHYEKLKGSPEDNEQKQLFVE |
| | | QHKHYLDEIIEQISEFSKRVILADANLDKVLSAYNKHRDKPIREQAENIIHLFTLTRLGAPRA |
| | | FKYFDTTIDPKQYRSTKEVLDATLIHQSITGLYETRIDLSQLGGD |
| met- | 14846 | DKKYSIGLDIGTNSVGWAVITDEYKVPSKKFKVLGNTDRHSIKKNLIGALLFDSGETAERTRL |
| SpRY | | KRTARRRYTRRKNRICYLQEIFSNEMAKVDDSFFHRLEESFLVEEDKKHERHPIFGNIVDEVA |
| nickase | | YHEKYPTIYHLRKKLVDSTDKADLRLIYLALAHMIKFRGHFLIEGDLNPDNSDVDKLFIQLVQ |
| | | TYNQLFEENPINASGVDAKAILSARLSKSRRLENLIAQLPGEKKNGLFGNLIALSLGLTPNFK |
| | | SNFDLAEDAKLQLSKDTYDDDLDNLLAQIGDQYADLFLAAKNLSDAILLSDILRVNTEITKAP |
| | | LSASMIKRYDEHHQDLTLLKALVRQQLPEKYKEIFFDQSKNGYAGYIDGGASQEEFYKFIKPI |
| | | LEKMDGTEELLVKLNREDLLRKQRTFDNGSIPHQIHLGELHAILRRQEDFYPFLKDNREKIEK |
| | | ILTFRIPYYVGPLARGNSRFAWMTRKSEETITPWNFEEVVDKGASAQSFIERMTNFDKNLPNE |
| | | KVLPKHSLLYEYFTVYNELTKVKYVTEGMRKPAFLSGEQKKAIVDLLFKTNRKVTVKQLKEDY |
| | | FKKIECFDSVEISGVEDRFNASLGTYHDLLKIIKDKDFLDNEENEDILEDIVLTLTLFEDREM |
| | | IEERLKTYAHLFDDKVMKQLKRRRYTGWGRLSRKLINGIRDKQSGKTILDFLKSDGFANRNFM |
| | | QLIHDDSLTFKEDIQKAQVSGQGDSLHEHIANLAGSPAIKKGILQTVKVVDELVKVMGRHKPE |
| | | NIVIEMARENQTTQKGQKNSRERMKRIEEGIKELGSQILKEHPVENTQLQNEKLYLYYLQNGR |
| | | DMYVDQELDINRLSDYDVDAIVPQSFLKDDSIDNKVLTRSDKNRGKSDNVPSEEVVKKMKNYW |
| | | RQLLNAKLITQRKFDNLTKAERGGLSELDKAGFIKRQLVETRQITKHVAQILDSRMNTKYDEN |
| | | DKLIREVKVITLKSKLVSDFRKDFQFYKVREINNYHHAHDAYLNAVVGTALIKKYPKLESEFV |
| | | YGDYKVYDVRKMIAKSEQEIGKATAKYFFYSNIMNFFKTEITLANGEIRKRPLIETNGETGEI |
| | | VWDKGRDFATVRKVLSMPQVNIVKKTEVQTGGFSKESIRPKRNSDKLIARKKDWDPKKYGGFL |
| | | WPTVAYSVLVVAKVEKGKSKKLKSVKELLGITIMERSSFEKNPIDFLEAKGYKEVKKDLIIKL |
| | | PKYSLFELENGRKRMLASAKQLQKGNELALPSKYVNFLYLASHYEKLKGSPEDNEQKQLFVEQ |
| | | HKHYLDEIIEQISEFSKRVILADANLDKVLSAYNKHRDKPIREQAENIIHLFTLTRLGAPRAF |
| | | KYFDTTIDPKQYRSTKEVLDATLIHQSITGLYETRIDLSQLGGD |
| sRGN3.1 | 14847 | MNQKFILGLDIGITSVGYGLIDYETKNIIDAGVRLFPEANVENNEGRRSKRGSRRLKRRRIHR |
| | | LERVKLLLTEYDLINKEQIPTSNNPYQIRVKGLSEILSKDELAIALLHLAKRRGIHNVDVAAD |
| | | KEETASDSLSTKDQINKNAKFLESRYVCELQKERLENEGHVRGVENRFLTKDIVREAKKIIDT |
| | | QMQYYPEIDETFKEKYISLVETRREYFEGPGQGSPFGWNGDLKKWYEMLMGHCTYFPQELRSV |
| | | KYAYSADLFNALNDLNNLIIQRDNSEKLEYHEKYHIIENVFKQKKKPTLKQIAKEIGVNPEDI |
| | | KGYRITKSGTPEFTSFKLFHDLKKVVKDHAILDDIDLLNQIAEILTIYQDKDSIVAELGQLEY |
| | | LMSEADKQSISELTGYTGTHSLSLKCMNMIIDELWHSSMNQMEVFTYLNMRPKKYELKGYQRI |
| | | PTDMIDDAILSPVVKRTFIQSINVINKVIEKYGIPEDIIIELARENNSDDRKKFINNLQKKNE |
| | | ATRKRINEIIGQTGNQNAKRIVEKIRLHDQQEGKCLYSLESIPLEDLLNNPNHYEVDHIIPRS |
| | | VSFDNSYHNKVLVKQSENSKKSNLTPYQYFNSGKSKLSYNQFKQHILNLSKSQDRISKKKKEY |
| | | LLEERDINKFEVQKEFINRNLVDTRYATRELTNYLKAYFSANNMNVKVKTINGSFTDYLRKVW |
| | | KFKKERNHGYKHHAEDALIIANADFLFKENKKLKAVNSVLEKPEIETKQLDIQVDSEDNYSEM |
| | | FIIPKQVQDIKDFRNFKYSHRVDKKPNRQLINDTLYSTRKKDNSTYIVQTIKDIYAKDNTTLK |
| | | KQFDKSPEKFLMYQHDPRTFEKLEVIMKQYANEKNPLAKYHEETGEYLTKYSKKNNGPIVKSL |
| | | KYIGNKLGSHLDVTHQFKSSTKKLVKLSIKNYRFDVYLTEKGYKFVTIAYLNVFKKDNYYYIP |
| | | KDKYQELKEKKKIKDTDQFIASFYKNDLIKLNGDLYKIIGVNSDDRNIIELDYYDIKYKDYCE |
| | | INNIKGEPRIKKTIGKKTESIEKFTTDVLGNLYLHSTEKAPQLIFKRGL |
| sRGN3.1 | 14848 | MNQKFILGLDIGITSVGYGLIDYETKNIIDAGVRLFPEANVENNEGRRSKRGSRRLKRRRIHR |
| (N585A) | | LERVKLLLTEYDLINKEQIPTSNNPYQIRVKGLSEILSKDELAIALLHLAKRRGIHNVDVAAD |
| Nickase | | KEETASDSLSTKDQINKNAKFLESRYVCELQKERLENEGHVRGVENRFLTKDIVREAKKIIDT |
| | | QMQYYPEIDETFKEKYISLVETRREYFEGPGQGSPFGWNGDLKKWYEMLMGHCTYFPQELRSV |
| | | KYAYSADLFNALNDLNNLIIQRDNSEKLEYHEKYHIIENVFKQKKKPTLKQIAKEIGVNPEDI |
| | | KGYRITKSGTPEFTSFKLFHDLKKVVKDHAILDDIDLLNQIAEILTIYQDKDSIVAELGQLEY |
| | | LMSEADKQSISELTGYTGTHSLSLKCMNMIIDELWHSSMNQMEVFTYLNMRPKKYELKGYQRI |
| | | PTDMIDDAILSPVVKRTFIQSINVINKVIEKYGIPEDIIIELARENNSDDRKKFINNLQKKNE |
| | | ATRKRINEIIGQTGNQNAKRIVEKIRLHDQQEGKCLYSLESIPLEDLLNNPNHYEVDHIIPRS |
| | | VSFDNSYHNKVLVKQSEASKKSNLTPYQYFNSGKSKLSYNQFKQHILNLSKSQDRISKKKKEY |
| | | LLEERDINKFEVQKEFINRNLVDTRYATRELTNYLKAYFSANNMNVKVKTINGSFTDYLRKVW |
| | | KFKKERNHGYKHHAEDALIIANADFLFKENKKLKAVNSVLEKPEIETKQLDIQVDSEDNYSEM |
| | | FIIPKQVQDIKDFRNFKYSHRVDKKPNRQLINDTLYSTRKKDNSTYIVQTIKDIYAKDNTTLK |
| | | KQFDKSPEKFLMYQHDPRTFEKLEVIMKQYANEKNPLAKYHEETGEYLTKYSKKNNGPIVKSL |
| | | KYIGNKLGSHLDVTHQFKSSTKKLVKLSIKNYRFDVYLTEKGYKFVTIAYLNVFKKDNYYYIP |
| | | KDKYQELKEKKKIKDTDQFIASFYKNDLIKLNGDLYKIIGVNSDDRNIIELDYYDIKYKDYCE |
| | | INNIKGEPRIKKTIGKKTESIEKFTTDVLGNLYLHSTEKAPQLIFKRGL |
| Met(—) | 14849 | NQKFILGLDIGITSVGYGLIDYETKNIIDAGVRLFPEANVENNEGRRSKRGSRRLKRRRIHRL |
| sRGN3.1 | | ERVKLLLTEYDLINKEQIPTSNNPYQIRVKGLSEILSKDELAIALLHLAKRRGIHNVDVAADK |
| (N584A) | | EETASDSLSTKDQINKNAKFLESRYVCELQKERLENEGHVRGVENRFLTKDIVREAKKIIDTQ |
| Nickase | | MQYYPEIDETFKEKYISLVETRREYFEGPGQGSPFGWNGDLKKWYEMLMGHCTYFPQELRSVK |
| | | YAYSADLFNALNDLNNLIIQRDNSEKLEYHEKYHIIENVFKQKKKPTLKQIAKEIGVNPEDIK |
| | | GYRITKSGTPEFTSFKLFHDLKKVVKDHAILDDIDLLNQIAEILTIYQDKDSIVAELGQLEYL |
| | | MSEADKQSISELTGYTGTHSLSLKCMNMIIDELWHSSMNQMEVFTYLNMRPKKYELKGYQRIP |
| | | TDMIDDAILSPVVKRTFIQSINVINKVIEKYGIPEDIIIELARENNSDDRKKFINNLQKKNEA |
| | | TRKRINEIIGQTGNQNAKRIVEKIRLHDQQEGKCLYSLESIPLEDLLNNPNHYEVDHIIPRSV |
| | | SFDNSYHNKVLVKQSEASKKSNLTPYQYFNSGKSKLSYNQFKQHILNLSKSQDRISKKKKEYL |
| | | LEERDINKFEVOKEFINRNLVDTRYATRELTNYLKAYFSANNMNVKVKTINGSFTDYLRKVWK |
| | | FKKERNHGYKHHAEDALIIANADFLFKENKKLKAVNSVLEKPEIETKQLDIQVDSEDNYSEMF |
| | | IIPKQVQDIKDFRNFKYSHRVDKKPNRQLINDTLYSTRKKDNSTYIVQTIKDIYAKDNTTLKK |
| | | QFDKSPEKFLMYQHDPRTFEKLEVIMKQYANEKNPLAKYHEETGEYLTKYSKKNNGPIVKSLK |
| | | YIGNKLGSHLDVTHQFKSSTKKLVKLSIKNYRFDVYLTEKGYKFVTIAYLNVFKKDNYYYIPK |
| | | DKYQELKEKKKIKDTDQFIASFYKNDLIKLNGDLYKIIGVNSDDRNIIELDYYDIKYKDYCEI |
| | | NNIKGEPRIKKTIGKKTESIEKFTTDVLGNLYLHSTEKAPQLIFKRGL |
| SRGN3.3 | 14850 | MNQKFILGLDIGITSVGYGLIDYETKNIIDAGVRLFPEANVENNEGRRSKRGSRRLKRRRIHR |
| | | LERVKLLLTEYDLINKEQIPTSNNPYQIRVKGLSEILSKDELAIALLHLAKRRGIHNVDVAAD |
| | | KEETASDSLSTKDQINKNAKFLESRYVCELQKERLENEGHVRGVENRFLTKDIVREAKKIIDT |
| | | QMQYYPEIDETFKEKYISLVETRREYFEGPGQGSPFGWNGDLKKWYEMLMGHCTYFPQELRSV |
| | | KYAYSADLFNALNDLNNLIIQRDNSEKLEYHEKYHIIENVFKQKKKPTLKQIAKEIGVNPEDI |
| | | KGYRITKSGTPEFTSFKLFHDLKKVVKDHAILDDIDLLNQIAEILTIYQDKDSIVAELGQLEY |
| | | LMSEADKQSISELTGYTGTHSLSLKCMNMIIDELWHSSMNQMEVFTYLNMRPKKYELKGYQRI |
| | | PTDMIDDAILSPVVKRTFIQSINVINKVIEKYGIPEDIIIELARENNSDDRKKFINNLQKKNE |
| | | ATRKRINEIIGQTGNQNAKRIVEKIRLHDQQEGKCLYSLESIPLEDLLNNPNHYEVDHIIPRS |
| | | VSFDNSYHNKVLVKQSENSKKSNLTPYQYFNSGKSKLSYNQFKQHILNLSKSQDRISKKKKEY |
| | | LLEERDINKFEVQKEFINRNLVDTRYATRELTSYLKAYFSANNMDVKVKTINGSFTNHLRKVW |
| | | RFDKYRNHGYKHHAEDALIIANADFLFKENKKLQNTNKILEKPTIENNTKKVTVEKEEDYNNV |
| | | FETPKLVEDIKQYRDYKFSHRVDKKPNRQLINDTLYSTRMKDEHDYIVQTITDIYGKDNTNLK |
| | | KQFNKNPEKFLMYQNDPKTFEKLSIIMKQYSDEKNPLAKYYEETGEYLTKYSKKNNGPIVKKI |
| | | KLLGNKVGNHLDVTNKYENSTKKLVKLSIKNYRFDVYLTEKGYKFVTIAYLNVFKKDNYYYIP |
| | | KDKYQELKEKKKIKDTDQFIASFYKNDLIKLNGDLYKIIGVNSDDRNIIELDYYDIKYKDYCE |
| | | INNIKGEPRIKKTIGKKTESIEKFTTDVLGNLYLHSTEKAPQLIFKRGL |
| sRGN3.3 | 14851 | MNQKFILGLDIGITSVGYGLIDYETKNIIDAGVRLFPEANVENNEGRRSKRGSRRLKRRRIHR |
| (N585A) | | LERVKLLLTEYDLINKEQIPTSNNPYQIRVKGLSEILSKDELAIALLHLAKRRGIHNVDVAAD |
| Nickase | | KEETASDSLSTKDQINKNAKFLESRYVCELQKERLENEGHVRGVENRFLTKDIVREAKKIIDT |
| | | QMQYYPEIDETFKEKYISLVETRREYFEGPGQGSPFGWNGDLKKWYEMLMGHCTYFPQELRSV |
| | | KYAYSADLFNALNDLNNLIIQRDNSEKLEYHEKYHIIENVFKQKKKPTLKQIAKEIGVNPEDI |
| | | KGYRITKSGTPEFTSFKLFHDLKKVVKDHAILDDIDLLNQIAEILTIYQDKDSIVAELGQLEY |
| | | LMSEADKQSISELTGYTGTHSLSLKCMNMIIDELWHSSMNQMEVFTYLNMRPKKYELKGYQRI |
| | | PTDMIDDAILSPVVKRTFIQSINVINKVIEKYGIPEDIIIELARENNSDDRKKFINNLQKKNE |
| | | ATRKRINEIIGQTGNQNAKRIVEKIRLHDQQEGKCLYSLESIPLEDLLNNPNHYEVDHIIPRS |
| | | VSFDNSYHNKVLVKQSEASKKSNLTPYQYFNSGKSKLSYNQFKQHILNLSKSQDRISKKKKEY |
| | | LLEERDINKFEVQKEFINRNLVDTRYATRELTSYLKAYFSANNMDVKVKTINGSFTNHLRKVW |
| | | RFDKYRNHGYKHHAEDALIIANADFLFKENKKLQNTNKILEKPTIENNTKKVTVEKEEDYNNV |
| | | FETPKLVEDIKQYRDYKFSHRVDKKPNRQLINDTLYSTRMKDEHDYIVQTITDIYGKDNTNLK |
| | | KQFNKNPEKFLMYQNDPKTFEKLSIIMKQYSDEKNPLAKYYEETGEYLTKYSKKNNGPIVKKI |
| | | KLLGNKVGNHLDVTNKYENSTKKLVKLSIKNYRFDVYLTEKGYKFVTIAYLNVFKKDNYYYIP |
| | | KDKYQELKEKKKIKDTDQFIASFYKNDLIKLNGDLYKIIGVNSDDRNIIELDYYDIKYKDYCE |
| | | INNIKGEPRIKKTIGKKTESIEKFTTDVLGNLYLHSTEKAPQLIFKRGL |
| Met(—) | 14852 | NQKFILGLDIGITSVGYGLIDYETKNIIDAGVRLFPEANVENNEGRRSKRGSRRLKRRRIHRL |
| sRGN3.3 | | ERVKLLLTEYDLINKEQIPTSNNPYQIRVKGLSEILSKDELAIALLHLAKRRGIHNVDVAADK |
| (N584A) | | EETASDSLSTKDQINKNAKFLESRYVCELQKERLENEGHVRGVENRFLTKDIVREAKKIIDTQ |
| Nickase | | MQYYPEIDETFKEKYISLVETRREYFEGPGQGSPFGWNGDLKKWYEMLMGHCTYFPQELRSVK |
| | | YAYSADLFNALNDLNNLIIQRDNSEKLEYHEKYHIIENVFKQKKKPTLKQIAKEIGVNPEDIK |
| | | GYRITKSGTPEFTSFKLFHDLKKVVKDHAILDDIDLLNQIAEILTIYQDKDSIVAELGQLEYL |
| | | MSEADKQSISELTGYTGTHSLSLKCMNMIIDELWHSSMNQMEVFTYLNMRPKKYELKGYQRIP |
| | | TDMIDDAILSPVVKRTFIQSINVINKVIEKYGIPEDIIIELARENNSDDRKKFINNLQKKNEA |
| | | TRKRINEIIGQTGNQNAKRIVEKIRLHDQQEGKCLYSLESIPLEDLLNNPNHYEVDHIIPRSV |
| | | SFDNSYHNKVLVKQSEASKKSNLTPYQYFNSGKSKLSYNQFKQHILNLSKSQDRISKKKKEYL |
| | | LEERDINKFEVQKEFINRNLVDTRYATRELTSYLKAYFSANNMDVKVKTINGSFTNHLRKVWR |
| | | FDKYRNHGYKHHAEDALIIANADFLFKENKKLQNTNKILEKPTIENNTKKVTVEKEEDYNNVF |
| | | ETPKLVEDIKQYRDYKFSHRVDKKPNRQLINDTLYSTRMKDEHDYIVQTITDIYGKDNTNLKK |
| | | QFNKNPEKFLMYQNDPKTFEKLSIIMKQYSDEKNPLAKYYEETGEYLTKYSKKNNGPIVKKIK |
| | | LLGNKVGNHLDVTNKYENSTKKLVKLSIKNYRFDVYLTEKGYKFVTIAYLNVFKKDNYYYIPK |
| | | DKYQELKEKKKIKDTDQFIASFYKNDLIKLNGDLYKIIGVNSDDRNIIELDYYDIKYKDYCEI |
| | | NNIKGEPRIKKTIGKKTESIEKFTTDVLGNLYLHSTEKAPQLIFKRGL |
| SpG | 14853 | MDKKYSIGLDIGTNSVGWAVITDEYKVPSKKFKVLGNTDRHSIKKNLIGALLFDSGETAEATR |
| | | LKRTARRRYTRRKNRICYLQEIFSNEMAKVDDSFFHRLEESFLVEEDKKHERHPIFGNIVDEV |
| | | AYHEKYPTIYHLRKKLVDSTDKADLRLIYLALAHMIKFRGHFLIEGDLNPDNSDVDKLFIQLV |
| | | QTYNQLFEENPINASGVDAKAILSARLSKSRRLENLIAQLPGEKKNGLFGNLIALSLGLTPNF |
| | | KSNFDLAEDAKLQLSKDTYDDDLDNLLAQIGDQYADLFLAAKNLSDAILLSDILRVNTEITKA |
| | | PLSASMIKRYDEHHQDLTLLKALVRQQLPEKYKEIFFDQSKNGYAGYIDGGASQEEFYKFIKP |
| | | ILEKMDGTEELLVKLNREDLLRKQRTFDNGSIPHQIHLGELHAILRRQEDFYPFLKDNREKIE |
| | | KILTFRIPYYVGPLARGNSRFAWMTRKSEETITPWNFEEVVDKGASAQSFIERMTNFDKNLPN |
| | | EKVLPKHSLLYEYFTVYNELTKVKYVTEGMRKPAFLSGEQKKAIVDLLFKTNRKVTVKQLKED |
| | | YFKKIECFDSVEISGVEDRFNASLGTYHDLLKIIKDKDFLDNEENEDILEDIVLTLTLFEDRE |
| | | MIEERLKTYAHLFDDKVMKQLKRRRYTGWGRLSRKLINGIRDKQSGKTILDFLKSDGFANRNF |
| | | MQLIHDDSLTFKEDIQKAQVSGQGDSLHEHIANLAGSPAIKKGILQTVKVVDELVKVMGRHKP |
| | | ENIVIEMARENQTTQKGQKNSRERMKRIEEGIKELGSQILKEHPVENTQLQNEKLYLYYLQNG |
| | | RDMYVDQELDINRLSDYDVDHIVPQSFLKDDSIDNKVLTRSDKNRGKSDNVPSEEVVKKMKNY |
| | | WRQLLNAKLITQRKFDNLTKAERGGLSELDKAGFIKRQLVETRQITKHVAQILDSRMNTKYDE |
| | | NDKLIREVKVITLKSKLVSDFRKDFQFYKVREINNYHHAHDAYLNAVVGTALIKKYPKLESEF |
| | | VYGDYKVYDVRKMIAKSEQEIGKATAKYFFYSNIMNFFKTEITLANGEIRKRPLIETNGETGE |
| | | IVWDKGRDFATVRKVLSMPQVNIVKKTEVQTGGFSKESILPKRNSDKLIARKKDWDPKKYGGF |
| | | LWPTVAYSVLVVAKVEKGKSKKLKSVKELLGITIMERSSFEKNPIDFLEAKGYKEVKKDLIIK |
| | | LPKYSLFELENGRKRMLASAKQLQKGNELALPSKYVNFLYLASHYEKLKGSPEDNEQKQLFVE |
| | | QHKHYLDEIIEQISEFSKRVILADANLDKVLSAYNKHRDKPIREQAENIIHLFTLTNLGAPAA |
| | | FKYFDTTIDRKQYRSTKEVLDATLIHQSITGLYETRIDLSQLGGD |
| SpG | 14854 | MDKKYSIGLDIGTNSVGWAVITDEYKVPSKKFKVLGNTDRHSIKKNLIGALLFDSGETAEATR |
| nickase | | LKRTARRRYTRRKNRICYLQEIFSNEMAKVDDSFFHRLEESFLVEEDKKHERHPIFGNIVDEV |
| | | AYHEKYPTIYHLRKKLVDSTDKADLRLIYLALAHMIKFRGHFLIEGDLNPDNSDVDKLFIQLV |
| | | QTYNQLFEENPINASGVDAKAILSARLSKSRRLENLIAQLPGEKKNGLFGNLIALSLGLTPNF |
| | | KSNFDLAEDAKLQLSKDTYDDDLDNLLAQIGDQYADLFLAAKNLSDAILLSDILRVNTEITKA |
| | | PLSASMIKRYDEHHQDLTLLKALVRQQLPEKYKEIFFDQSKNGYAGYIDGGASQEEFYKFIKP |
| | | ILEKMDGTEELLVKLNREDLLRKQRTFDNGSIPHQIHLGELHAILRRQEDFYPFLKDNREKIE |
| | | KILTFRIPYYVGPLARGNSRFAWMTRKSEETITPWNFEEVVDKGASAQSFIERMTNFDKNLPN |
| | | EKVLPKHSLLYEYFTVYNELTKVKYVTEGMRKPAFLSGEQKKAIVDLLFKTNRKVTVKQLKED |
| | | YFKKIECFDSVEISGVEDRFNASLGTYHDLLKIIKDKDFLDNEENEDILEDIVLTLTLFEDRE |
| | | MIEERLKTYAHLFDDKVMKQLKRRRYTGWGRLSRKLINGIRDKQSGKTILDFLKSDGFANRNF |
| | | MQLIHDDSLTFKEDIQKAQVSGQGDSLHEHIANLAGSPAIKKGILQTVKVVDELVKVMGRHKP |
| | | ENIVIEMARENQTTQKGQKNSRERMKRIEEGIKELGSQILKEHPVENTQLQNEKLYLYYLQNG |
| | | RDMYVDQELDINRLSDYDVDAIVPQSFLKDDSIDNKVLTRSDKNRGKSDNVPSEEVVKKMKNY |
| | | WRQLLNAKLITQRKFDNLTKAERGGLSELDKAGFIKRQLVETRQITKHVAQILDSRMNTKYDE |
| | | NDKLIREVKVITLKSKLVSDFRKDFQFYKVREINNYHHAHDAYLNAVVGTALIKKYPKLESEF |
| | | VYGDYKVYDVRKMIAKSEQEIGKATAKYFFYSNIMNFFKTEITLANGEIRKRPLIETNGETGE |
| | | IVWDKGRDFATVRKVLSMPQVNIVKKTEVQTGGFSKESILPKRNSDKLIARKKDWDPKKYGGF |
| | | LWPTVAYSVLVVAKVEKGKSKKLKSVKELLGITIMERSSFEKNPIDFLEAKGYKEVKKDLIIK |
| | | LPKYSLFELENGRKRMLASAKQLQKGNELALPSKYVNFLYLASHYEKLKGSPEDNEQKQLFVE |
| | | QHKHYLDEIIEQISEFSKRVILADANLDKVLSAYNKHRDKPIREQAENIIHLFTLTNLGAPAA |
| | | FKYFDTTIDRKQYRSTKEVLDATLIHQSITGLYETRIDLSQLGGD |
| met- | 14855 | DKKYSIGLDIGTNSVGWAVITDEYKVPSKKFKVLGNTDRHSIKKNLIGALLFDSGETAEATRL |
| SpG | | KRTARRRYTRRKNRICYLQEIFSNEMAKVDDSFFHRLEESFLVEEDKKHERHPIFGNIVDEVA |
| nickase | | YHEKYPTIYHLRKKLVDSTDKADLRLIYLALAHMIKFRGHFLIEGDLNPDNSDVDKLFIQLVQ |
| | | TYNQLFEENPINASGVDAKAILSARLSKSRRLENLIAQLPGEKKNGLFGNLIALSLGLTPNFK |
| | | SNFDLAEDAKLQLSKDTYDDDLDNLLAQIGDQYADLFLAAKNLSDAILLSDILRVNTEITKAP |
| | | LSASMIKRYDEHHQDLTLLKALVRQQLPEKYKEIFFDQSKNGYAGYIDGGASQEEFYKFIKPI |
| | | LEKMDGTEELLVKLNREDLLRKQRTFDNGSIPHQIHLGELHAILRRQEDFYPFLKDNREKIEK |
| | | ILTFRIPYYVGPLARGNSRFAWMTRKSEETITPWNFEEVVDKGASAQSFIERMTNFDKNLPNE |
| | | KVLPKHSLLYEYFTVYNELTKVKYVTEGMRKPAFLSGEQKKAIVDLLFKTNRKVTVKQLKEDY |
| | | FKKIECFDSVEISGVEDRFNASLGTYHDLLKIIKDKDFLDNEENEDILEDIVLTLTLFEDREM |
| | | IEERLKTYAHLFDDKVMKQLKRRRYTGWGRLSRKLINGIRDKQSGKTILDFLKSDGFANRNFM |
| | | QLIHDDSLTFKEDIQKAQVSGQGDSLHEHIANLAGSPAIKKGILQTVKVVDELVKVMGRHKPE |
| | | NIVIEMARENQTTQKGQKNSRERMKRIEEGIKELGSQILKEHPVENTQLQNEKLYLYYLQNGR |
| | | DMYVDQELDINRLSDYDVDAIVPQSFLKDDSIDNKVLTRSDKNRGKSDNVPSEEVVKKMKNYW |
| | | ROLLNAKLITQRKFDNLTKAERGGLSELDKAGFIKRQLVETRQITKHVAQILDSRMNTKYDEN |
| | | DKLIREVKVITLKSKLVSDFRKDFQFYKVREINNYHHAHDAYLNAVVGTALIKKYPKLESEFV |
| | | YGDYKVYDVRKMIAKSEQEIGKATAKYFFYSNIMNFFKTEITLANGEIRKRPLIETNGETGEI |
| | | VWDKGRDFATVRKVLSMPQVNIVKKTEVQTGGFSKESILPKRNSDKLIARKKDWDPKKYGGFL |
| | | WPTVAYSVLVVAKVEKGKSKKLKSVKELLGITIMERSSFEKNPIDFLEAKGYKEVKKDLIIKL |
| | | PKYSLFELENGRKRMLASAKQLQKGNELALPSKYVNFLYLASHYEKLKGSPEDNEQKQLFVEQ |
| | | HKHYLDEIIEQISEFSKRVILADANLDKVLSAYNKHRDKPIREQAENIIHLFTLTNLGAPAAF |
| | | KYFDTTIDRKQYRSTKEVLDATLIHQSITGLYETRIDLSQLGGD |
| Met- | 14876 | DKKYSIGLDIGTNSVGWAVITDEYKVPSKKFKVLGNTDRHSIKKNLIGALLFDSGETAEATRL |
| SpCAS9 | | KRTARRRYTRRKNRICYLQEIFSNEMAKVDDSFFHRLEESFLVEEDKKHERHPIFGNIVDEVA |
| (R221K | | YHEKYPTIYHLRKKLVDSTDKADLRLIYLALAHMIKFRGHFLIEGDLNPDNSDVDKLFIQLVQ |
| N394K | | TYNQLFEENPINASGVDAKAILSARLSKSRKLENLIAQLPGEKKNGLFGNLIALSLGLTPNFK |
| H840A) | | SNFDLAEDAKLQLSKDTYDDDLDNLLAQIGDQYADLFLAAKNLSDAILLSDILRVNTEITKAP |
| | | LSASMIKRYDEHHQDLTLLKALVRQQLPEKYKEIFFDQSKNGYAGYIDGGASQEEFYKFIKPI |
| | | LEKMDGTEELLVKLKREDLLRKQRTFDNGSIPHQIHLGELHAILRRQEDFYPFLKDNREKIEK |
| | | ILTFRIPYYVGPLARGNSRFAWMTRKSEETITPWNFEEVVDKGASAQSFIERMTNFDKNLPNE |
| | | KVLPKHSLLYEYFTVYNELTKVKYVTEGMRKPAFLSGEQKKAIVDLLFKTNRKVTVKQLKEDY |
| | | FKKIECFDSVEISGVEDRFNASLGTYHDLLKIIKDKDFLDNEENEDILEDIVLTLTLFEDREM |
| | | IEERLKTYAHLFDDKVMKQLKRRRYTGWGRLSRKLINGIRDKQSGKTILDFLKSDGFANRNFM |
| | | QLIHDDSLTFKEDIQKAQVSGQGDSLHEHIANLAGSPAIKKGILQTVKVVDELVKVMGRHKPE |
| | | NIVIEMARENQTTQKGQKNSRERMKRIEEGIKELGSQILKEHPVENTQLQNEKLYLYYLQNGR |
| | | DMYVDQELDINRLSDYDVDAIVPQSFLKDDSIDNKVLTRSDKNRGKSDNVPSEEVVKKMKNYW |
| | | ROLLNAKLITQRKFDNLTKAERGGLSELDKAGFIKRQLVETRQITKHVAQILDSRMNTKYDEN |
| | | DKLIREVKVITLKSKLVSDFRKDFQFYKVREINNYHHAHDAYLNAVVGTALIKKYPKLESEFV |
| | | YGDYKVYDVRKMIAKSEQEIGKATAKYFFYSNIMNFFKTEITLANGEIRKRPLIETNGETGEI |
| | | VWDKGRDFATVRKVLSMPQVNIVKKTEVQTGGFSKESILPKRNSDKLIARKKDWDPKKYGGFD |
| | | SPTVAYSVLVVAKVEKGKSKKLKSVKELLGITIMERSSFEKNPIDFLEAKGYKEVKKDLIIKL |
| | | PKYSLFELENGRKRMLASAGELQKGNELALPSKYVNFLYLASHYEKLKGSPEDNEQKQLFVEQ |
| | | HKHYLDEIIEQISEFSKRVILADANLDKVLSAYNKHRDKPIREQAENIIHLFTLTNLGAPAAF |
| | | KYFDTTIDRKRYTSTKEVLDATLIHQSITGLYETRIDLSQLGGD |

[0144] In some embodiments, a Cas9 protein comprises a variant Cas9 protein containing one or more amino acid substitutions. In some embodiments, a wildtype Cas9 protein comprises a RuvC domain and an HNH domain. In some embodiments, a prime editor comprises a nuclease active Cas9 protein that may cleave both strands of a double stranded target DNA sequence. In some embodiments, the nuclease active Cas9 protein comprises a functional RuvC domain and a functional HNH domain. In some embodiments, a prime editor comprises a Cas9 nickase that can bind to a guide polynucleotide and recognize a target DNA, but can cleave only one strand of a double stranded target DNA. In some embodiments, the Cas9 nickase comprises only one functional RuvC domain or one functional HNH domain. In some embodiments, a prime editor comprises a Cas9 that has a non-functional HNH domain and a functional RuvC domain. In some embodiments, the prime editor can cleave the edit strand (i.e., the PAM strand), but not the non-edit strand of a double stranded target DNA sequence. In some embodiments, a prime editor comprises a Cas9 having a non-functional RuvC domain that can cleave the target strand (i.e., the non-PAM strand), but not the edit strand of a double stranded target DNA sequence. In some embodiments, a prime editor comprises a Cas9 that has neither a functional RuvC domain nor a functional HNH domain, which may not cleave any strand of a double stranded target DNA sequence.

[0145] In some embodiments, a prime editor comprises a Cas9 having a mutation in the RuvC domain that reduces or abolishes the nuclease activity of the RuvC domain. In some embodiments, the Cas9 comprises a mutation at amino acid D10 as compared to a wild type SpCas9 as set forth in SEQ ID NO: 14829, or a corresponding mutation thereof. In some embodiments, the Cas9 comprises a D10A mutation as compared to a wild type SpCas9 as set forth in SEQ ID NO: 14829, or a corresponding mutation thereof. In some embodiments, the Cas9 polypeptide comprises a mutation at amino acid D10, G12, and/or G17 as compared to a wild type SpCas9 as set forth in SEQ ID NO: 14829, or a corresponding mutation thereof. In some embodiments, the Cas9 polypeptide comprises a D10A mutation, a G12A mutation, and/or a G17A mutation as compared to a wild type SpCas9 as set forth in SEQ ID NO: 14829, or a corresponding mutation thereof.

[0146] In some embodiments, a prime editor comprises a Cas9 polypeptide having a mutation in the HNH domain that reduces or abolishes the nuclease activity of the HNH domain. In some embodiments, the Cas9 polypeptide comprises a mutation at amino acid H840 as compared to a wild type SpCas9 as set forth in SEQ ID NO: 14829, or a corresponding mutation thereof. In some embodiments, the Cas9 polypeptide comprises a H840A mutation as compared to a wild type SpCas9 as set forth in SEQ ID NO: 14830, or a corresponding mutation thereof. In some embodiments, the Cas9 polypeptide comprises a mutation at amino acid E762, D839, H840, N854, N856, N863, H982, H983, A984, D986, and/or a A987 as compared to a wild type SpCas9 as set forth in SEQ ID NO: 14829, or a corresponding mutation thereof. In some embodiments, the Cas9 polypeptide comprises a E762A, D839A, H840A, N854A, N856A, N863A, H982A, H983A, A984A, and/or a D986A mutation as compared to a wild type SpCas9 as set forth in SEQ ID NO: 14829, or a corresponding mutation thereof. In some embodiments, the Cas9 polypeptide comprises a mutation at amino acid R221, N394, and/or H840 as compared to a wild type SpCas9 as set forth in SEQ ID NO: 14829, or a corresponding mutation thereof. In some embodiments, the Cas9 polypeptide comprises a mutation at amino acid R220, N393, and/or H839 as compared to a wild type SpCas9 (as set forth in SEQ ID NO: 14829) lacking a N-terminal methionine, or a corresponding mutation thereof. In some embodiments, the Cas9 polypeptide comprises a mutation at amino acid R221K, N394L, and/or H840A as compared to a wild type SpCas9 as set forth in SEQ ID NO: 14829, or a corresponding mutation thereof. In some embodiments, the Cas9 polypeptide comprises a mutation at amino acid R220K, N393K, and/or H839A as compared to a wild type SpCas9 (as set forth in SEQ ID NO: 14829) lacking a N-terminal methionine, or a corresponding mutation thereof. In some embodiments, the Cas9 polypeptide comprises a mutation at amino acid R220K, N393K, and/or H839A as compared to a wild type SpCas9 (as set forth in SEQ ID NO: 14970).

[0147] In some embodiments, a prime editor comprises a Cas9 having one or more amino acid substitutions in both the HNH domain and the RuvC domain that reduce or abolish the nuclease activity of both the HNH domain and the RuvC domain. In some embodiments, the prime editor comprises a nuclease inactive Cas9, or a nuclease dead Cas9 (dCas9). In some embodiments, the dCas9 comprises a H840X substitution and a D10X mutation compared to a wild type SpCas9 as set forth in SEQ ID NO: 14829 or corresponding mutations thereof, wherein X is any amino acid other than H for the H840X substitution and any amino acid other than D for the DIOX substitution. In some embodiments, the dead Cas9 comprises a H840A and a D10A mutation as compared to a wild type SpCas9 as set forth in SEQ ID NO: 14829, or corresponding mutations thereof.

[0148] In some embodiments, the N-terminal methionine is removed from a Cas9 nickase, or from any Cas9 variant, ortholog, or equivalent disclosed or contemplated herein. For example, methionine-minus Cas9 nickases include any one of the sequences set forth in SEQ ID Nos:14831, 14834, 14837, 14840, 14843, 14846, 14849, 14852, 14855, 14876, or a variant thereof having an amino acid sequence that has at least 80%, at least 85%, at least 90%, at least 95%, or at least 99% sequence identity thereto.

[0149] Besides dead Cas9 and Cas9 nickase variants, the Cas9 proteins used herein may also include other Cas9 variants having at least about 70% identical, at least about 80% identical, at least about 90% identical, at least about 95% identical, at least about 96% identical, at least about 97% identical, at least about 98% identical, at least about 99% identical, at least about 99.5% identical, or at least about 99.9% identical to any reference Cas9 protein, including any wild type Cas9, or mutant Cas9 (e.g., a dead Cas9 or Cas9 nickase), or fragment Cas9, or circular permutant Cas9, or other variant of Cas9 disclosed herein or known in the art. In some embodiments, a Cas9 variant may have 1, 2, 3, 4, 5, 6, 7, 8, 9, 10, 11, 12, 13, 14, 15, 16, 17, 18, 19,20, 21, 22, 21, 24, 25, 26, 27, 28, 29, 30, 31, 32, 33, 34, 35, 36, 37, 38, 39, 40, 41, 42, 43, 44, 45, 46, 47, 48, 49, 50 or more amino acid changes compared to a reference Cas9, e.g., a wild type Cas9. In some embodiments, the Cas9 variant comprises a fragment of a reference Cas9 (e.g., a gRNA binding domain or a DNA-cleavage domain), such that the fragment is at least about 70% identical, at least about 80% identical, at least about 90% identical, at least about 95% identical, at least about 96% identical, at least about 97% identical, at least about 98% identical, at least about 99% identical, at least about 99.5% identical, or at least about 99.9% identical to the corresponding fragment of the reference Cas9, e.g., a wild type Cas9. In some embodiments, the fragment is at least 30%, at least 35%, at least 40%, at least 45%, at least 50%, at least 55%, at least 60%, at least 65%, at least 70%, at least 75%, at least 80%, at least 85%, at least 90%, at least 95% identical, at least 96%, at least 97%, at least 98%, at least 99%, or at least 99.5% of the amino acid length of a corresponding wild type Cas9.

[0150] In some embodiments, a Cas9 fragment is a functional fragment that retains one or more Cas9 activities. In some embodiments, the Cas9 fragment is at least 100 amino acids in length. In some embodiments, the fragment is at least 100, 150, 200, 250, 300, 350, 400, 450, 500, 550, 600, 650, 700, 750, 800, 850, 900, 950, 1000, 1050, 1100, 1150, 1200, 1250, or at least 1300 amino acids in length.

[0151] In some embodiments, a prime editor comprises a Cas protein, e.g., Cas9, containing modifications that allow altered PAM recognition. In prime editing using a Cas-protein-based prime editor, a “protospacer adjacent motif (PAM)”, PAM sequence, or PAM-like motif, may be used to refer to a short DNA sequence immediately following the protospacer sequence on the PAM strand of the target gene. In some embodiments, the PAM is recognized by the Cas nuclease in the prime editor during prime editing. In certain embodiments, the PAM is required for target binding of the Cas protein. The specific PAM sequence required for Cas protein recognition may depend on the specific type of the Cas protein. A PAM can be 1, 2, 3, 4, 5, 6, 7, 8, 9, 10 or more nucleotides in length. In some embodiments, a PAM is between 2-6 nucleotides in length. In some embodiments, the PAM can be a 5′ PAM (i.e., located upstream of the 5′ end of the protospacer). In other embodiments, the PAM can be a 3′ PAM (i.e., located downstream of the 5′ end of the protospacer).In some embodiments, the Cas protein of a prime editor recognizes a canonical PAM, for example, a SpCas9 recognizes 5′-NGG-3′ PAM. In some embodiments, the Cas protein of a prime editor has altered or non-canonical PAM specificities. Exemplary PAM sequences and corresponding Cas variants are described in Table 87 below. It should be appreciated that for each of the variants provided, the Cas protein comprises one or more of the amino acid substitutions as indicated compared to a wild type Cas protein sequence, for example, the Cas9 as set forth in SEQ ID NO: 14829. The PAM motifs as shown in Table 87 below are in the order of 5′ to 3′. In some embodiments, the Cas proteins of the invention can also be used to direct transcriptional control of target sequences, for example silencing transcription by sequence-specific binding to target sequences. In some embodiments, a Cas protein described herein may have one or mutation in a PAM recognition motif. In some embodiments, a Ca protein described herein may have altered PAM specificity. In some embodiments, the disclosure provides PEgRNA comprising a spacer that correspond to the altered PAM.

[0152] As used in PAM sequences in Table 1, “N” refers to any one of nucleotides A, G, C, and T, “R” refers to nucleotide A or G, and “Y” refers to nucleotide C or T.

TABLE 87
Cas protein variants and corresponding PAM sequences

| Variant | PAM |
|---|---|
| spCas9 (wild type) | NGG, NGA, |
| | NAG, NGNGA |
| spCas9- VRVRFRR | NG |
| R1335V/L1111R/D1135V/G1218R/E1219F/ | |
| A1322R/T1337R | |
| spCas9-VQR (D1135V/R1335Q/T1337R) | NGA |
| spCas9-EQR (D1135E/R1335Q/T1337R) | NGA |
| spCas9-VRER (D1135V/G1218R/R1335E/ | NGCG |
| T1337R) | |
| spCas9-VRQR (D1135V, G1218R, R1335Q, | NGA |
| T1337R) | |
| Cas9-NG (L1111R, D1135V, G1218R, E1219F, | NGN |
| A1322R, T1337R, R1335V) | |
| SpG Cas9 (D1135L, S1136W, G1218K, E1219Q, | NGN |
| R1335Q, T1337R) | |
| SyRY Cas9 (A61R, L1111R, N1317R, A1322R, | NRN |
| and R1333P) | |
| xCas9 (E480K, E543D, E1219V, K294R, Q1256K, | NGN |
| A262T, S409I, M694I) | |
| SluCa9 | NNGG |
| SRGN1, sRGN2, sRGN4, sRGN3.1, sRGN3.3 | NNGG |
| saCas9 | NNGRRT |
| | NNGRRN |
| saCas9-KKH (E782K, N968K, R1015H) | NNNRRT |
| spCas9-MQKSER (D1135M, S1136Q, G1218K, | NGCG/NGCN |
| E1219S, R1335E, T1337R) | |
| spCas9-LRKIQK (D1135L, S1136R, G1218K, | NGTN |
| E1219I, R1335Q, T1337K) | |
| spCas9-LRVSQK (D1135L, S1136R, G1218V, | NGTN |
| E1219S, R1335Q, T1337K) | |
| spCas9-LRVSQL(D1135L, S1136R, G1218V, | NGTN |
| E1219S, R1335Q, T1337L) | |
| Cpf1 | TTTV |
| Spy-Mac | NAA |
| NmCas9 | NNNNGATT |
| StCas9 | NNAGAAW |
| TdCas9 | NAAAAC |

[0153] In some embodiments, a prime editor comprises a Cas9 polypeptide comprising one or mutations selected from the group consisting of: A61R, L111R, D1135, R221K, A262T, R324L, N394K, S409I, S409I, E427G, E480K, M495V, N497A, Y515N, K526E, F539S, E543D, R654L, R661A, R661L, R691A, N692A, M694A, M694I, Q695A, H698A, R753G, M763I, K848A, K890N, Q926A, K1003A, R1060A, L1111R, R1114G, D1135E, D1135L, D1135N, S1136W, V1139A, D1180G, G1218K, G1218R, G1218S, E1219Q, E1219V, E1219V, Q1221H, P1249S, E1253K, N1317R, A1320V, P1321S, A1322R, I1322V, D1332G, R1332N, A1332R, R1333K, R1333P, R1335L, R1335Q, R1335V, T1337N, T1337R, S1338T, H1349R, and any combinations thereof as compared to a wildtype SpCas9 polypeptide as set forth in SEQ ID NO: 14829.

[0154] In some embodiments, a prime editor comprises a SaCas9 polypeptide. In some embodiments, the SaCas9 polypeptide comprises one or more of mutations E782K, N968K, and R1015H as compared to a wild type SaCas9. In some embodiments, a prime editor comprises a FnCas9 polypeptide, for example, a wildtype FnCas9 polypeptide or a FnCas9 polypeptide comprising one or more of mutations E1369R, E1449H, or R1556A as compared to the wild type FnCas9. In some embodiments, a prime editor comprises a Sc Cas9, for example, a wild type ScCas9 or a ScCas9 polypeptide comprises one or more of mutations I367K, G368D, I369K, H371L, T375S, T376G, and T1227K as compared to the wild type ScCas9. In some embodiments, a prime editor comprises a St1 Cas9 polypeptide, a St3 Cas9 polypeptide, or a Slu Cas9 polypeptide.

[0155] In some embodiments, a prime editor comprises a Cas polypeptide that comprises a circular permutant Cas variant. For example, a Cas9 polypeptide of a prime editor may be engineered such that the N-terminus and the C-terminus of a Cas9 protein (e.g., a wild type Cas9 protein, or a Cas9 nickase) are topically rearranged to retain the ability to bind DNA when complexed with a guide RNA (gRNA). An exemplary circular permutant configuration may be N-terminus-[original C-terminus]-[original N-terminus]-C-terminus. Any of the Cas9 proteins described herein, including any variant, ortholog, or naturally occurring Cas9 or equivalent thereof, may be reconfigured as a circular permutant variant.

[0156] In various embodiments, the circular permutants of a Cas protein, e.g., a Cas9, may have the following structure: N-terminus-[original C-terminus]-[optional linker]-[original N-terminus]-C-terminus. In some embodiments, a circular permutant Cas9 comprises any one of the following structures (amino acid positions as set forth in SEQ ID NO: 14829):
[0157] N-terminus-[1268-1368]-[optional linker]-[1-1267]-C-terminus;
[0158] N-terminus-[1168-1368]-[optional linker]-[1-1167]-C-terminus;
[0159] N-terminus-[1068-1368]-[optional linker]-[1-1067]-C-terminus;
[0160] N-terminus-[968-1368]-[optional linker]-[1-967]-C-terminus;
[0161] N-terminus-[868-1368]-[optional linker]-[1-867]-C-terminus;
[0162] N-terminus-[768-1368]-[optional linker]-[1-767]-C-terminus;
[0163] N-terminus-[668-1368]-[optional linker]-[1-667]-C-terminus;
[0164] N-terminus-[568-1368]-[optional linker]-[1-567]-C-terminus;
[0165] N-terminus-[468-1368]-[optional linker]-[1-467]-C-terminus;
[0166] N-terminus-[368-1368]-[optional linker]-[1-3671-C-terminus;
[0167] N-terminus-[268-1368]-[optional linker]-[1-2671-C-terminus;
[0168] N-terminus-[168-13681-[optional linker]-[1-1671-C-terminus;
[0169] N-terminus-[68-1368]-[optional linker]-[1-671-C-terminus;
[0170] N-terminus-[10-1368]-[optional linker]-[1-9]-C-terminus, or the corresponding circular permutants of other Cas9 proteins (including other Cas9 orthologs, variants, etc).

[0171] In some embodiments, a circular permutant Cas9 comprises any one of the following structures (amino acid positions as set forth in SEQ ID NO: 14829-1368 amino acids of UniProtKB-Q99ZW2:
[0172] N-terminus-[102-1368]-[optional linker]-[1-101]-C-terminus;
[0173] N-terminus-[1028-1368]-[optional linker]-[1-10271-C-terminus;
[0174] N-terminus-[1041-1368]-[optional linker]-[1-10431-C-terminus;
[0175] N-terminus-[1249-1368]-[optional linker]-[1-1248]-C-terminus; or
[0176] N-terminus-[1300-1368]-[optional linker]-[1-1299]-C-terminus, or the corresponding circular permutants of other Cas9 proteins (including other Cas9 orthologs, variants, etc).

[0177] In some embodiments, a circular permutant Cas9 comprises any one of the following structures (amino acid positions as set forth in SEQ ID NO: 14829-1368 amino acids of UniProtKB-Q99ZW2 N-terminus-[103-1368]-[optional linker]-[1-1021-C-terminus:
[0178] N-terminus-[1029-1368]-[optional linker]-[1-1028]-C-terminus;
[0179] N-terminus-[1042-1368]-[optional linker]-[1-1041]-C-terminus;
[0180] N-terminus-[1250-1368]-[optional linker]-[1-12491-C-terminus; or
[0181] N-terminus-[1301-1368]-[optional linker]-[1-1300]-C-terminus, or the corresponding circular permutants of other Cas9 proteins (including other Cas9 orthologs, variants, etc).

[0182] In some embodiments, the circular permutant can be formed by linking a C-terminal fragment of a Cas9 to an N-terminal fragment of a Cas9, either directly or by using a linker, such as an amino acid linker. In some embodiments, the C-terminal fragment may correspond to the 95% or more of the C-terminal amino acids of a Cas9 (e.g., amino acids about 1300-1368 as set forth in SEQ ID No: 14829 or corresponding amino acid positions thereof), or the 90%, 85%, 80%, 75%, 70%, 65%, 60%, 55%, 50%, 45%, 40%, 35%, 30%, 25%, 20%, 15%, 10%, or 5% or more of the C-terminal amino acids of a Cas9 (e.g., SEQ ID NO: 14829 or a ortholog or a variant thereof). The N-terminal portion may correspond to 95% or more of the N-terminal amino acids of a Cas9 (e.g., amino acids about 1-1300 as set forth in SEQ ID No: 14829 or corresponding amino acid positions thereof), or 90%, 85%, 80%, 75%, 70%, 65%, 60%, 55%, 50%, 45%, 40%, 35%, 30%, 25%, 20%, 15%, 10%, or 5% or more of the N terminal amino acids of a Cas9 (e.g., as set forth in SEQ ID No: 14829 or corresponding amino acid positions thereof).

[0183] In some embodiments, the circular permutant can be formed by linking a C-terminal fragment of a Cas9 to an N-terminal fragment of a Cas9, either directly or by using a linker, such as an amino acid linker. In some embodiments, the C-terminal fragment that is rearranged to the N-terminus includes or corresponds to the C-terminal 30% or less of the amino acids of a Cas9 (e.g., amino acids 1012-1368 as set forth in SEQ ID No: 14829 or corresponding amino acid positions thereof). In some embodiments, the C-terminal fragment that is rearranged to the N-terminus, includes or corresponds to the C-terminal 30%, 29%, 28%, 27%, 26%, 25%, 24%, 23%, 22%, 21%, 20%, 19%, 18%, 17%, 16%, 15%, 14%, 13%, 12%, 11%, 10%, 9%, 8%, 7%, 6%,5%, 4%, 3%, 2%, or 1% of the amino acids of a Cas9 (e.g., as set forth in SEQ ID No: 14829 or corresponding amino acid positions thereof). In some embodiments, the C-terminal fragment that is rearranged to the N-terminus, includes or corresponds to the C-terminal 410 residues or less of a Cas9 (e.g., as set forth in SEQ ID No: 14829 or corresponding amino acid positions thereof). In some embodiments, the C-terminal portion that is rearranged to the N-terminus, includes or corresponds to the C-terminal 410, 400, 390, 380, 370, 360, 350, 340, 330, 320, 310, 300, 290, 280, 270, 260, 250, 240, 230, 220, 210, 200, 190, 180, 170, 160, 150, 140, 130, 120, 110, 100, 90, 80, 70, 60, 50, 40, 30, 20, or 10 residues of a Cas9 (e.g. as set forth in SEQ ID No: 14829 or corresponding amino acid positions thereof). In some embodiments, the C-terminal portion that is rearranged to the N-terminus includes or corresponds to the C-terminal 357, 341, 328, 120, or 69 residues of a Cas9 (e.g., as set forth in SEQ ID No: 14829 or corresponding amino acid positions thereof).

[0184] In other embodiments, circular permutant Cas9 variants may be a topological rearrangement of a Cas9 primary structure based on the following method, which is based on S. pyogenes Cas9 of SEQ ID NO: 14829: (a) selecting a circular permutant (CP) site corresponding to an internal amino acid residue of the Cas9 primary structure, which dissects the original protein into two halves: an N-terminal region and a C-terminal region; (b) modifying the Cas9 protein sequence (e.g., by genetic engineering techniques) by moving the original C-terminal region (comprising the CP site amino acid) to precede the original N-terminal region, thereby forming a new N-terminus of the Cas9 protein that now begins with the CP site amino acid residue. The CP site can be located in any domain of the Cas9 protein, including, for example, the helical-II domain, the RuvCIII domain, or the CTD domain. For example, the CP site may be located (as set forth in SEQ ID No: 14829 or corresponding amino acid positions thereof) at original amino acid residue 181, 199, 230, 270, 310, 1010, 1016, 1023, 1029, 1041, 1247, 1249, or 1282. Thus, once relocated to the N-terminus, original amino acid 181, 199, 230, 270, 310, 1010, 1016, 1023, 1029, 1041, 1247, 1249, or 1282 would become the new N-terminal amino acid. Nomenclature of these CP-Cas9 proteins may be referred to as Cas9-CP¹⁸¹, Cas9-CP¹⁹⁹, Cas9-CP²³⁰, Cas9-CP²⁷⁰, Cas9-CP³¹⁰, Cas9-CP¹⁰¹⁰, Cas9-CP¹⁰¹⁶, Cas9-CP¹⁰²³, Cas9-CP¹⁰²⁹, Cas9-CP¹⁰⁴¹, Cas9-CP¹²⁴⁷, Cas9-CP¹²⁴⁹, and Cas9-CP¹²⁸², respectively. This description is not meant to be limited to making CP variants from SEQ ID NO: 14829 but may be implemented to make CP variants in any Cas9 sequence, either at CP sites that correspond to these positions, or at other CP sites entirely. This description is not meant to limit the specific CP sites in any way. Virtually any CP site may be used to form a CP-Cas9 variant.

[0185] In some embodiments, a prime editor comprises a Cas9 functional variant that is of smaller molecular weight than a wild type SpCas9 protein. In some embodiments, a smaller-sized Cas9 functional variant may facilitate delivery to cells, e.g., by an expression vector, nanoparticle, or other means of delivery. In certain embodiments, a smaller-sized Cas9 functional variant is a Class 2 Type II Cas protein. In certain embodiments, a smaller-sized Cas9 functional variant is a Class 2 Type V Cas protein. In certain embodiments, a smaller-sized Cas9 functional variant is a Class 2 Type VI Cas protein.

[0186] In some embodiments, a prime editor comprises a SpCas9 that is 1368 amino acids in length and has a predicted molecular weight of 158 kilodaltons. In some embodiments, a prime editor comprises a Cas9 functional variant or functional fragment that is less than 1300 amino acids, less than 1290 amino acids, than less than 1280 amino acids, less than 1270 amino acids, less than 1260 amino acid, less than 1250 amino acids, less than 1240 amino acids, less than 1230 amino acids, less than 1220 amino acids, less than 1210 amino acids, less than 1200 amino acids, less than 1190 amino acids, less than 1180 amino acids, less than 1170 amino acids, less than 1160 amino acids, less than 1150 amino acids, less than 1140 amino acids, less than 1130 amino acids, less than 1120 amino acids, less than 1110 amino acids, less than 1100 amino acids, less than 1050 amino acids, less than 1000 amino acids, less than 950 amino acids, less than 900 amino acids, less than 850 amino acids, less than 800 amino acids, less than 750 amino acids, less than 700 amino acids, less than 650 amino acids, less than 600 amino acids, less than 550 amino acids, or less than 500 amino acids, but at least larger than about 400 amino acids and retaining the one or more functions, e.g., DNA binding function, of the Cas9 protein.

[0187] In some embodiments, the Cas protein may include any CRISPR associated protein, including but not limited to, Cas12a, Cas12b1, Cas1, Cas1B, Cas2, Cas3, Cas4, Cas5, Cas6, Cas7, CaS8, Cas9 (also known as Csn1 and Csx12), Cas10, Csy1, Csy2, Csy3, Cse1, Cse2, Csc1, Csc2, Csa5, Csn2, Csm2, Csm3, Csm4, Csm5, Csm6, Cmr1, Cmr3, Cmr4, Cmr5, Cmr6, Csb1, Csb2, Csb3, Csx17, Csx14, Csx10, Csx16, CsaX, Csx3, Csx1, Csx15, Csf1, Csf2, Csf3, Csf4, homologs thereof, or modified versions thereof, and preferably comprising a nickase mutation (e.g., a mutation corresponding to the D10A mutation of the wild type Cas9 polypeptide of SEQ ID NO: 14829). In various other embodiments, the napDNAbp can be any of the following proteins: a Cas9, a Cas12a (Cpf1), a Cas12e (CaX), a Cas12d (CasY), a Cas2b1 (C2c1), a Cas13a (C2c2), a Cas12c (Cc), a GeoCas9, a CjCas9, a Cas2g, a Cas12h, a Cas12i, a Cas13b, a Cas13c, a Cas13d, a Cas14, a Csn2, an xCas9, an SpCas9-NG, a circularly permuted Cas9, or an Argonaute (Ago) domain, or a functional variant or fragment thereof.

[0188] Exemplary Cas proteins and nomenclature are shown in Table 88 below:

TABLE 88
Exemplary Cas proteins and nomenclature

| | |
|---|---|
| Legacy nomenclature | Current nomenclature |

type II CRISPR-Cas enzymes

| | |
|---|---|
| Cas9 | same |

type V CRISPR-Cas enzymes

| | |
|---|---|
| Cpf1 | Cas12a |
| CasX | Cas12e |
| C2c1 | Cas12b1 |
| Cas12b2 | same |
| C2c3 | Cas12c |
| CasY | Cas12d |
| C2c4 | same |
| C2c8 | same |
| C2c5 | same |
| C2c10 | same |
| C2c9 | same |

type VI CRISPR-Cas enzymes

| | |
|---|---|
| C2c2 | Cas13a |
| Cas13d | same |
| C2c7 | Cas13c |
| C2c6 | Cas13b |

[0189] In some embodiments, prime editors described herein may also comprise CMs proteins other than CMs9. For example, in some embodiments, a prime editor as described herein may comprise a Cas12a (Cpf1) polypeptide or functional variants thereof. In some embodiments, the Cas12a polypeptide comprises a mutation that reduces or abolishes the endonuclease domain of the Cas12a polypeptide. In some embodiments, the Cas12a polypeptide is a Cas12a nickase. In some embodiments, the CMs protein comprises an amino acid sequence that comprises at least about 50%, 60%, 70%, 80%, 90%, 91%, 92%, 93%, 94%, 95%, 96%, 97%, 98%, 99%, or 100% sequence identity to a naturally occurring Cas12a polypeptide.

[0190] In some embodiments, a prime editor comprises a Cas protein that is a Cas12b (C2c1) or a Cas12c (C2c3) polypeptide. In some embodiments, the Cas protein comprises an amino acid sequence that comprises at least about 50%, 60%, 70%, 80%, 90%, 91%, 92%, 93%, 94%, 95%, 96%, 97%, 98%, 99%, or 100% sequence identity to a naturally occurring Cas12b (C2c1) or Cas12c (C2c3) protein. In some embodiments, the Cas protein is a Cas12b nickase or a Cas12c nickase. In some embodiments, the Cas protein is a Cas12e, a Cas12d, a Cas13, Cas14a, Cas14b, Cas14c, Cas14d, Cas14e, Cas14f, Cas14g, Cas14h, Cas14u, or a CasΦ polypeptide. In some embodiments, the Cas protein comprises an amino acid sequence that comprises at least about 50%, 60%, 70%, 80%, 90%, 91%, 92%, 93%, 94%, 95%, 96%, 97%, 98%, 99%, or 100% sequence identity to a naturally-occurring Cas12e, Cas12d, Cas13, Cas14a, Cas14b, Cas14c, Cas14d, Cas14e, Cas14f, Cas14g, Cas14h, Cas14u, or Cas Φ protein. In some embodiments, the Cas protein is a Cas12e, Cas12d, Cas13, or Cas Φ nickase.

### Nuclear Localization Sequences

[0191] In some embodiments, a prime editor further comprises one or more nuclear localization sequence (NLS). In some embodiments, the NLS helps promote translocation of a protein into the cell nucleus. In some embodiments, a prime editor comprises a fusion protein, e.g., a fusion protein comprising a DNA binding domain and a DNA polymerase, that comprises one or more NLSs. In some embodiments, one or more polypeptides of the prime editor are fused to or linked to one or more NLSs. In some embodiments, the prime editor comprises a DNA binding domain and a DNA polymerase domain that are provided in trans, wherein the DNA binding domain and/or the DNA polymerase domain is fused or linked to one or more NLSs.

[0192] In certain embodiments, a prime editor or prime editing complex comprises at least one NLS. In some embodiments, a prime editor or prime editing complex comprises at least two NLSs. In embodiments with at least two NLSs, the NLSs can be the same NLS, or they can be different NLSs.

[0193] In some instances, a prime editor may further comprise at least one nuclear localization sequence (NLS). In some cases, a prime editor may further comprise 1 NLS. In some cases, a prime editor may further comprise 2 NLSs. In other cases, a prime editor may further comprise 3 NLSs. In one case, a primer editor can further comprise more than 4, 5, 6, 7, 8, 9 or 10 NLSs.

[0194] In addition, the NLSs can be expressed as part of a prime editor complex. In some embodiments, a NLS can be positioned almost anywhere in a protein's amino acid sequence, and generally comprises a short sequence of three or more or four or more amino acids. The location of the NLS fusion can be at the N-terminus, the C-terminus, or positioned anywhere within a sequence of a prime editor or a component thereof (e.g., inserted between the DNA-binding domain and the DNA polymerase domain of a prime editor fusion protein, between the DNA binding domain and a linker sequence, between a DNA polymerase and a linker sequence, between two linker sequences of a prime editor fusion protein or a component thereof, in either N-terminus to C-terminus or C-terminus to N-terminus order). In some embodiments, a prime editor is fusion protein that comprises an NLS at the N terminus. In some embodiments, a prime editor is fusion protein that comprises an NLS at the C terminus. In some embodiments, a prime editor is fusion protein that comprises at least one NLS at both the N terminus and the C terminus. In some embodiments, the prime editor is a fusion protein that comprises two NLSs at the N terminus and/or the C terminus.

[0195] Any NLSs that are known in the art are also contemplated herein. The NLSs may be any naturally occurring NLS, or any non-naturally occurring NLS (e.g., an NLS with one or more mutations relative to a wild-type NLS). In some embodiments, the one or more NLSs of a prime editor comprise bipartite NLSs. In some embodiments, a nuclear localization signal (NLS) is predominantly basic. In some embodiments, the one or more NLSs of a prime editor are rich in lysine and arginine residues. In some embodiments, the one or more NLSs of a prime editor comprise proline residues.

[0196] In some embodiments, a nuclear localization signal (NLS) comprises the sequence

| (SEQ ID NO: 14864) | |
|---|---|
| | MDSLLMNRRKFLYQFKNVRWAKGRRETYLC, |
| (SEQ ID NO: 14913) | |
| | KRTADGSEFESPKKKRKV, |
| (SEQ ID NO: 14914) | |
| | KRTADGSEFEPKKKRKV, |
| (SEQ ID NO: 14915) | |
| | NLSKRPAAIKKAGQAKKKK, |
| (SEQ ID NO: 14916) | |
| | RQRRNELKRSF, |
| | or |
| (SEQ ID NO: 14917) | |
| | NQSSNFGPMKGGNFGGRSSGPYGGGGQYFAKPRNQGGY. |

[0197] In some embodiments, a NLS is a monopartite NLS. For example, in some embodiments, a NLS is a SV40 large T antigen NLS PKKKRKV (SEQ ID NO: 14862). In some embodiments, a NLS is a bipartite NLS. In some embodiments, a bipartite NLS comprises two basic domains separated by a spacer sequence comprising a variable number of amino acids. In some embodiments, a NLS is a bipartite NLS. In some embodiments, a bipartite NLS consists of two basic domains separated by a spacer sequence comprising a variable number of amino acids. In some embodiments, the spacer amino acid sequence comprises the sequence KRXXXXXXXXXXKKKL (Xenopus nucleoplasmin NLS) (SEQ ID NO: 14918), wherein X is any amino acid. In some embodiments, the NLS comprises a nucleoplasmin NLS sequence KRPAATKKAGQAKKKK (SEQ ID NO: 14919). In some embodiments, a NLS is a noncanonical sequences such as M9 of the hnRNP A1 protein, the influenza virus nucleoprotein NLS, and the yeast Gal4 protein NLS. In some embodiments, a NLS is a noncanonical sequences such as M9 of the hnRNP A1 protein, the influenza virus nucleoprotein NLS, and the yeast Gal4 protein NLS.

[0198] In some embodiments, a bipartite NLS consists of two basic domains separated by a spacer sequence comprising a variable number of amino acids. In some embodiments, a NLS comprises an amino acid sequence that is at least about 50%, 60%, 70%, 80%, 90%, 91%, 92%, 93%, 94%, 95%, 96%, 97%, 98%, 99%, or 100% identical to the amino acid sequence of any one of SEQ ID NOs: 14862-14872. In some embodiments, a NLS comprises an amino acid sequence selected from the group consisting of 14862-14872. In some embodiments, a prime editing composition comprises a polynucleotide that encodes a NLS that comprises an amino acid sequence that is at least about 50%, 60%, 70%, 80%, 90%, 91%, 92%, 93%, 94%, 95%, 96%, 97%, 98%, 99%, or 100% identical to the amino acid sequence of any one of SEQ ID NOs: 14862-14872. In some embodiments, a prime editing composition comprises a polynucleotide that encodes a NLS that comprises an amino acid sequence selected from the group consisting of 14862-14872.

[0199] Any NLSs that are known in the art are also contemplated herein. The NLSs may be any naturally occurring NLS, or any non-naturally occurring NLS (e.g., an NLS with one or more mutations relative to a wild-type NLS). In some embodiments, the one or more NLSs of a prime editor comprise bipartite NLSs. In some embodiments, the one or more NLSs of a prime editor are rich in lysine and arginine residues. In some embodiments, the one or more NLSs of a prime editor comprise proline residues. Non-limiting examples of NLS sequences are provided in Table 89 below.

[0200] In addition, the NLSs may be expressed as part of a prime editor composition, fusion protein, or complex. The location of the NLS fusion can be at the N-terminus, the C-terminus, or positioned anywhere within a sequence of a prime editor or a component thereof (e.g., inserted between the DNA binding domain and the DNA polymerase domain of a prime editor fusion protein, between the DNA binding domain and a linker sequence, between a DNA polymerase and a linker sequence, between two linker sequences of a prime editor fusion protein or a component thereof, in either N-terminus to C-terminus or C-terminus to N-terminus order). In some embodiments, a prime editor is a fusion protein that comprises an NLS at the N terminus. In some embodiments, a prime editor is a fusion protein that comprises an NLS at the C terminus. In some embodiments, a prime editor is a fusion protein that comprises at least one NLS at both the N terminus and the C terminus. In some embodiments, the prime editor is a fusion protein that comprises two NLSs at the N terminus and/or the C terminus.

[0201] Non-limiting examples of NLS sequences are provided in Table 89 below.

TABLE 89
Exemplary nuclear localization sequences

| | | SEQ ID |
|---|---|---|
| Description | Sequence | NO: |
| NLS of SV40 Large T-AG | PKKKRKV | 14862 |
| NLS | MKRTADGSEFESPKKKRKV | 14863 |
| NLS | MDSLLMNRRKFLYQFKNVRWAKGRRETYLC | 14864 |
| NLS of Nucleoplasmin | AVKRPAATKKAGQAKKKKLD | 14865 |
| NLS of EGL-13 | MSRRRKANPTKLSENAKKLAKEVEN | 14866 |
| NLS of C-Myc | PAAKRVKLD | 14867 |
| NLS of Tus-protein | KLKIKRPVK | 14868 |
| NLS of polyoma large T-AG | VSRKRPRP | 14869 |
| NLS of Hepatitis D virus | EGAPPAKRAR | 14870 |
| antigen | | |
| NLS of murine p53 | PPQPKKKPLDGE | 14871 |
| C-Terminal linker and NLS | SGGSKRTADGSEFEPKKKRKV | 14872 |
| of an exemplary prime | | |
| editor fusion protein | | |

[0202] In some embodiments, a prime editing complex comprises a fusion protein comprising a DNA binding domain (e.g., Cas9(H840A)) and a reverse transcriptase (e.g., a variant MMLV RT) having the following structure: [NLS]-[Cas9(H840A)]-[linker]-[MMLV_RT(D200N)(T330P)(L603W)(T306K)(W313F)], and a desired PEgRNA. In some embodiments, the prime editing complex comprises a prime editor fusion protein that has the amino acid sequence of SEQ ID NO: 14873: Sequence of an exemplary prime editor fusion protein comprising a DNA binding domain (e.g., Cas9(H840A)) and a reverse transcriptase (e.g., a variant MMLV RT) having the following structure: [NLS]-[Cas9(H840A)]-[linker]-[MMLV_RT(D200N)(T330P)(L603W)(T306K)(W313F)] and its components are shown in Table 90.

[0203] In some embodiments, a prime editing complex comprises a fusion protein comprising a DNA binding domain (e.g., Cas9((R221K N394K H840A)) and a reverse transcriptase (e.g., a variant MMLV RT) having the following structure: [NLS]-[Cas9((R221K N394K H840A)]-[linker]-[MMLV_RT(D200N)(T330P)(L603W)(T306K)(W313F)], and a desired PEgRNA. In some embodiments, the prime editing complex comprises a prime editor fusion protein that has the amino acid sequence of SEQ ID NO: 14874. Sequence of an exemplary prime editor fusion protein comprising a DNA binding domain (e.g., Cas9(H840A)) and a reverse transcriptase (e.g., a variant MMLV RT) having the following structure: [NLS]-[Cas9 (R221K N394K H840A)]-[linker]-[MMLV_RT(D200N)(T330P)(L603W)(T306K)(W313F)] and its components are shown in Table 91.

[0204] Polypeptides comprising components of a prime editor may be fused via peptide linkers, or may be provided in trans relevant to each other. For example, a reverse transcriptase may be expressed, delivered, or otherwise provided as an individual component rather than as a part of a fusion protein with the DNA binding domain. In such cases, components of the prime editor may be associated through non-peptide linkages or co-localization functions. In some embodiments, a prime editor further comprises additional components capable of interacting with, associating with, or capable of recruiting other components of the prime editor or the prime editing system. For example, a prime editor may comprise an RNA-protein recruitment polypeptide that can associate with an RNA-protein recruitment RNA aptamer. In some embodiments, an RNA-protein recruitment polypeptide can recruit, or be recruited by, a specific RNA sequence. Non limiting examples of RNA-protein recruitment polypeptide and RNA aptamer pairs include a MS2 coat protein and a MS2 RNA hairpin, a PCP polypeptide and a PP7 RNA hairpin, a Com polypeptide and a Com RNA hairpin, a Ku protein and a telomerase Ku binding RNA motif, and a Sm7 protein and a telomerase Sm7 binding RNA motif. In some embodiments, the prime editor comprises a DNA binding domain fused or linked to an RNA-protein recruitment polypeptide. In some embodiments, the prime editor comprises a DNA polymerase domain fused or linked to an RNA-protein recruitment polypeptide. In some embodiments, the DNA binding domain and the DNA polymerase domain fused to the RNA-protein recruitment polypeptide, or the DNA binding domain fused to the RNA-protein recruitment polypeptide and the DNA polymerase domain are co-localized by the corresponding RNA-protein recruitment RNA aptamer of the RNA-protein recruitment polypeptide. In some embodiments, the corresponding RNA-protein recruitment RNA aptamer fused or linked to a portion of the PEgRNA or ngRNA. For example, an MS2 coat protein fused or linked to the DNA polymerase and a MS2 hairpin installed on the PEgRNA for co-localization of the DNA polymerase and the RNA-guided DNA binding domain (e.g., a Cas9 nickase).

[0205] In some embodiments, a prime editor comprises a polypeptide domain, an MS2 coat protein (MCP), that recognizes an MS2 hairpin. In some embodiments, the nucleotide sequence of the MS2 hairpin (or equivalently referred to as the “MS2 aptamer”) is: GCCAACATGAGGATCACCCATGTCTGCAGGGCC (SEQ ID NO: 14960). In some embodiments, the amino acid sequence of the MCP is:

(SEQ ID NO: 14961)
GSASNFTQFVLVDNGGTGDVTVAPSNFANGVAEWISSNSRSQAYKVTCSV
RQSSAQNRKYTIKVEVPKVATQTVGGEELPVAGWRSYLNMELTIPIFATN
SDCELIVKAMQGLLKDGNPIPSAIAANSGIY.

[0206] In certain embodiments, components of a prime editor are directly fused to each other. In certain embodiments, components of a prime editor are associated to each other via a linker.

[0207] As used herein, a linker can be any chemical group or a molecule linking two molecules or moieties, e.g., a DNA binding domain and a polymerase domain of a prime editor. In some embodiments, a linker is an organic molecule, group, polymer, or chemical moiety. In some embodiments, the linker comprises a non-peptide moiety. The linker may be as simple as a covalent bond, or it may be a polymeric linker many atoms in length, for example, a polynucleotide sequence. In certain embodiments, the linker is a covalent bond (e.g., a carbon-carbon bond, disulfide bond, carbon-heteroatom bond, etc.).

[0208] In certain embodiments, two or more components of a prime editor are linked to each other by a peptide linker. In some embodiments, a peptide linker is 5-100 amino acids in length, for example, 2, 3, 4, 5, 6, 7, 8, 9, 10, 11, 12, 13, 14, 15, 16, 17, 18, 19, 20, 21, 22, 23, 24, 25, 26, 27, 28, 29, 30, 30-35, 35-40, 40-45, 45-50, 50-60, 60-70, 70-80, 80-90, 90-100, 100-150, or 150-200 amino acids in length. In some embodiments, the peptide linker is 5, 6, 7, 8, 9, 10, 11, 12, 13, 14, 15, 16, 17, 18, 19, 20, 25, 35, 45, 50, 55, 60, 60, 65, 70, 70, 75, 80, 85, 90, 90, 95, 100, 101, 102, 103, 104, 105, 110, 120, 130, 140,150, 160, 175, 180, 190, or 200 amino acids in length. In some embodiments, the peptide linker is 5-100 amino acids in length. In some embodiments, the peptide linker is 10-80 amino acids in length. In some embodiments, the peptide linker is 15-70 amino acids in length. In some embodiments, the peptide linker is 16 amino acids in length, 24 amino acids in length, 64 amino acids in length, or 96 amino acids in length. In some embodiments, the peptide linker is at least 50 amino acids in length. In some embodiments, the peptide linker is at least 40 amino acids in length. In some embodiments, the peptide linker is at least 30 amino acids in length. In some embodiments, the peptide linker is 46 amino acids in length. In some embodiments, the peptide linker is 92 amino acids in length. In some embodiments, the peptide linker is 16 amino acids in length, 24 amino acids in length, 64 amino acids in length, or 96 amino acids in length.

[0209] In some embodiments, the linker comprises the amino acid sequence (GGGGS)n (SEQ ID NO: 14881), (G)n (SEQ ID NO: 14882), (EAAAK)n (SEQ ID NO: 14883), (GGS)n (SEQ ID NO: 14884), (SGGS)n (SEQ ID NO: 14886), (XP)n (SEQ ID NO: 14887), or any combination thereof, wherein n is independently an integer between 1 and 30, and wherein X is any amino acid. In some embodiments, the linker comprises the amino acid sequence (GGS)n (SEQ ID NO: 14904), wherein n is 1, 3, or 7. In some embodiments, the linker comprises the amino acid sequence SGSETPGTSESATPES (SEQ ID NO: 14888). In some embodiments, the linker comprises the amino acid sequence SGGSSGGSSGS ETPGTSESATPESSGGSSGGS (SEQ ID NO: 14889). In some embodiments, the linker comprises the amino acid sequence SGGSGGSGGS (SEQ ID NO: 14891). In some embodiments, the linker comprises the amino acid sequence SGGS (SEQ ID NO: 14892). In other embodiments, the linker comprises the amino acid sequence

(SEQ ID NO: 14893
SGGSSGGSSGSETPGTSESATPESAGSYPYDVPDYAGSAAPAAKKKKLDG
SGSGGSSGGS.

[0210] In some embodiments, a linker comprises 1-100 amino acids. In some embodiments, the linker comprises the amino acid sequence SGSETPGTSESATPES (SEQ ID NO: 14888). In some embodiments, the linker comprises the amino acid sequence SGGSSGGSSGSETPGTSESATPESSGGSSGGS (SEQ ID NO: 14889). In some embodiments, the linker comprises the amino acid sequence SGGSGGSGGS (SEQ ID NO: 14891). In some embodiments, the linker comprises the amino acid sequence SGGS (SEQ ID NO: 14892). In some embodiments, the linker comprises the amino acid sequence GGSGGS (SEQ ID NO: 14911), GGSGGSGGS (SEQ ID NO: 14912), SGGSSGGSSGSETPGTSESATPESAGSYPYDVPDYAGSAAPAAKKKKLDGSGSGGSSGGS (SEQ ID NO: 14893), or SGGSSGGSSGSETPGTSESATPESSGGSSGGSS (SEQ ID NO: 14890.

[0211] In certain embodiments, two or more components of a prime editor are linked to each other by a non-peptide linker. In some embodiments, the linker is a carbon-nitrogen bond of an amide linkage. In certain embodiments, the linker is a cyclic or acyclic, substituted or unsubstituted, branched or unbranched aliphatic or heteroaliphatic linker. In certain embodiments, the linker is polymeric (e.g., polyethylene, polyethylene glycol, polyamide, polyester, etc.). In certain embodiments, the linker comprises a monomer, dimer, or polymer of aminoalkanoic acid. In certain embodiments, the linker comprises an aminoalkanoic acid (e.g., glycine, ethanoic acid, alanine, beta-alanine, 3-aminopropanoic acid, 4-aminobutanoic acid, 5-pentanoic acid, etc.). In certain embodiments, the linker comprises a monomer, dimer, or polymer of aminohexanoic acid (Ahx). In certain embodiments, the linker is based on a carbocyclic moiety (e.g., cyclopentane, cyclohexane). In other embodiments, the linker comprises a polyethylene glycol moiety (PEG). In certain embodiments, the linker comprises an aryl or heteroaryl moiety. In certain embodiments, the linker is based on a phenyl ring. The linker may include functionalized moieties to facilitate attachment of a nucleophile (e.g., thiol, amino) from the peptide to the linker. Any electrophile may be used as part of the linker. Exemplary electrophiles include, but are not limited to, activated esters, activated amides, Michael acceptors, alkyl halides, aryl halides, acyl halides, and isothiocyanates.

[0212] Components of a prime editor may be connected to each other in any order. In some embodiments, the DNA binding domain and the DNA polymerase domain of a prime editor may be fused to form a fusion protein or may be joined by a peptide or protein linker, in any order from the N terminus to the C terminus. In some embodiments, a prime editor comprises a DNA binding domain fused or linked to the C-terminal end of a DNA polymerase domain. In some embodiments, a prime editor comprises a DNA binding domain fused or linked to the N-terminal end of a DNA polymerase domain. In some embodiments, the prime editor comprises a fusion protein comprising the structure NH2-[DNA binding domain]-[polymerase]-COOH; or NH2-[polymerase]-[DNA binding domain]-COOH, wherein each instance of “]-[” indicates the presence of an optional linker sequence. In some embodiments, a prime editor comprises a fusion protein and a DNA polymerase domain provided in trans, wherein the fusion protein comprises the structure NH2-[DNA binding domain]-[RNA-protein recruitment polypeptide]-COOH. In some embodiments, a prime editor comprises a fusion protein and a DNA binding domain provided in trans, wherein the fusion protein comprises the structure NH2-[DNA polymerase domain]-[RNA-protein recruitment polypeptide]-COOH.

[0213] In some embodiments, a prime editor fusion protein, a polypeptide component of a prime editor, or a polynucleotide encoding the prime editor fusion protein or polypeptide component, may be split into an N-terminal half and a C-terminal half or polypeptides that encode the N-terminal half and the C terminal half, and provided to a target DNA in a cell separately. For example, in certain embodiments, a prime editor fusion protein may be split into a N-terminal and a C-terminal half for separate delivery in AAV vectors, and subsequently translated and colocalized in a target cell to reform the complete polypeptide or prime editor protein. In such cases, separate halves of a protein or a fusion protein may each comprise a split-intein to facilitate colocalization and reformation of the complete protein or fusion protein by the mechanism of intein facilitated trans splicing. In some embodiments, a prime editor comprises a N-terminal half fused to an intein-N, and a C-terminal half fused to an intein-C, or polynucleotides or vectors (e.g., AAV vectors) encoding each thereof. When delivered and/or expressed in a target cell, the intein-N and the intein-C can be excised via protein trans-splicing, resulting in a complete prime editor fusion protein in the target cell.

[0214] In some embodiments, a prime editor fusion protein comprises a Cas9(H840A) nickase and a wild type M-MLV RT, e.g., “PE1”, and a prime editing system or composition may be referred to as PE1 system or PE1 composition. In some embodiments, a prime editor fusion protein comprises a Cas9(H840A) nickase and a M-MLV RT that comprises amino acid substitutions D200N, T330P, T306K, W313F, and L603W compared to a wild type M-MLV RT. In some embodiments, a prime editor fusion protein comprises a Cas9(H840A) nickase and a M-MLV RT that comprises amino acid substitutions D200N, T330P, T306K, W313F, and L603W compared to a wild type M-MLV RT (e.g., “PE2”, and a prime editing system or composition referred to as PE2 system or PE2 composition). The amino acid sequence of an exemplary PE2 and its individual components in shown in Table 90. In some embodiments, a prime editor fusion protein comprises a Cas9(R221K N394K H840A) nickase and a M-MLV RT that comprises amino acid substitutions D200N, T330P, T306K, W313F, and L603W compared to a wild type M-MLV RT. The amino acid sequence of an exemplary Prime editor fusion protein and its individual components in shown in Table 91. In some embodiments, an exemplary PE fusion protein may lack a methionine at the N-terminus. In some embodiments an exemplary prime editor protein may comprise an amino acid sequence as set forth in any of the SEQ ID NOs. 14874, or 14875, 14899, or 14900.

[0215] In various embodiments, a prime editor fusion proteins comprise an amino acid sequence that is at least about 70% identical, at least about 80% identical, at least about 90% identical, at least about 95% identical, at least about %% identical, at least about 97% identical, at least about 98% identical, at least about 99% identical, at least about 99.5% identical, or at least about 99.9% identical to any of the prime editor fusion sequences described herein or known in the art.

TABLE 90
lists exemplary prime editor and its components

| SEQ ID | | |
|---|---|---|
| NO. | DESCRIPTION | SEQUENCE |
| 14874 | Exemplary Prime Editor | MKRTADGSEFESPKKKRKVDKKYSIGLDIGTNSVGWAVITDEYKVPSKKFKV |
| | [NLS]-[Cas9(H840A)]- | LGNTDRHSIKKNLIGALLFDSGETAEATRLKRTARRRYTRRKNRICYLQEIF |
| | [linker]-[MMLV_RT(D200N) | SNEMAKVDDSFFHRLEESFLVEEDKKHERHPIFGNIVDEVAYHEKYPTIYHL |
| | (T330P)(L603W)(T306K) | RKKLVDSTDKADLRLIYLALAHMIKFRGHFLIEGDLNPDNSDVDKLFIQLVQ |
| | (W313F)]-[NLS] | TYNQLFEENPINASGVDAKAILSARLSKSRRLENLIAQLPGEKKNGLFGNLI |
| | | ALSLGLTPNFKSNFDLAEDAKLQLSKDTYDDDLDNLLAQIGDQYADLFLAAK |
| | | NLSDAILLSDILRVNTEITKAPLSASMIKRYDEHHQDLTLLKALVRQQLPEK |
| | | YKEIFFDQSKNGYAGYIDGGASQEEFYKFIKPILEKMDGTEELLVKLNREDL |
| | | LRKQRTFDNGSIPHQIHLGELHAILRRQEDFYPFLKDNREKIEKILTFRIPY |
| | | YVGPLARGNSRFAWMTRKSEETITPWNFEEVVDKGASAQSFIERMTNFDKNL |
| | | PNEKVLPKHSLLYEYFTVYNELTKVKYVTEGMRKPAFLSGEQKKAIVDLLFK |
| | | TNRKVTVKQLKEDYFKKIECFDSVEISGVEDRFNASLGTYHDLLKIIKDKDF |
| | | LDNEENEDILEDIVLTLTLFEDREMIEERLKTYAHLFDDKVMKQLKRRRYTG |
| | | WGRLSRKLINGIRDKQSGKTILDFLKSDGFANRNFMQLIHDDSLTFKEDIQK |
| | | AQVSGQGDSLHEHIANLAGSPAIKKGILQTVKVVDELVKVMGRHKPENIVIE |
| | | MARENQTTQKGQKNSRERMKRIEEGIKELGSQILKEHPVENTQLQNEKLYLY |
| | | YLQNGRDMYVDQELDINRLSDYDVDAIVPQSFLKDDSIDNKVLTRSDKNRGK |
| | | SDNVPSEEVVKKMKNYWRQLLNAKLITQRKFDNLTKAERGGLSELDKAGFIK |
| | | RQLVETRQITKHVAQILDSRMNTKYDENDKLIREVKVITLKSKLVSDFRKDF |
| | | QFYKVREINNYHHAHDAYLNAVVGTALIKKYPKLESEFVYGDYKVYDVRKMI |
| | | AKSEQEIGKATAKYFFYSNIMNFFKTEITLANGEIRKRPLIETNGETGEIVW |
| | | DKGRDFATVRKVLSMPQVNIVKKTEVQTGGFSKESILPKRNSDKLIARKKDW |
| | | DPKKYGGFDSPTVAYSVLVVAKVEKGKSKKLKSVKELLGITIMERSSFEKNP |
| | | IDFLEAKGYKEVKKDLIIKLPKYSLFELENGRKRMLASAGELQKGNELALPS |
| | | KYVNFLYLASHYEKLKGSPEDNEQKQLFVEQHKHYLDEIIEQISEFSKRVIL |
| | | ADANLDKVLSAYNKHRDKPIREQAENIIHLFTLTNLGAPAAFKYFDTTIDRK |
| | | RYTSTKEVLDATLIHQSITGLYETRIDLSQLGGDSGGSSGGSSGSETPGTSE |
| | | SATPESSGGSSGGSSTLNIEDEYRLHETSKEPDVSLGSTWLSDFPQAWAETG |
| | | GMGLAVRQAPLIIPLKATSTPVSIKQYPMSQEARLGIKPHIQRLLDQGILVP |
| | | CQSPWNTPLLPVKKPGTNDYRPVQDLREVNKRVEDIHPTVPNPYNLLSGLPP |
| | | SHQWYTVLDLKDAFFCLRLHPTSQPLFAFEWRDPEMGISGQLTWTRLPQGFK |
| | | NSPTLFNEALHRDLADFRIQHPDLILLQYVDDLLLAATSELDCQQGTRALLQ |
| | | TLGNLGYRASAKKAQICQKQVKYLGYLLKEGQRWLTEARKETVMGQPTPKTP |
| | | RQLREFLGKAGFCRLFIPGFAEMAAPLYPLTKPGTLFNWGPDQQKAYQEIKQ |
| | | ALLTAPALGLPDLTKPFELFVDEKQGYAKGVLTQKLGPWRRPVAYLSKKLDP |
| | | VAAGWPPCLRMVAAIAVLTKDAGKLTMGQPLVILAPHAVEALVKQPPDRWLS |
| | | NARMTHYQALLLDTDRVQFGPVVALNPATLLPLPEEGLQHNCLDILAEAHGT |
| | | RPDLTDQPLPDADHTWYTDGSSLLQEGQRKAGAAVTTETEVIWAKALPAGTS |
| | | AQRAELIALTQALKMAEGKKLNVYTDSRYAFATAHIHGEIYRRRGWLTSEGK |
| | | EIKNKDEILALLKALFLPKRLSIIHCPGHQKGHSAEARGNRMADQAARKAAI |
| | | TETPDTSTLLIENSSPSGGSKRTADGSEFEPKKKRKV |
| | | KEY: |
| | | NUCLEAR LOCALIZATION SEQUENCE (NLS) |
| | | CAS9(H840A) |
| | | 33-AMINO ACID LINKER |
| | | M-MLV REVERSE TRANSCRIPTASE |
| 14899 | Met-Exemplary Prime | KRTADGSEFESPKKKRKVDKKYSIGLDIGTNSVGWAVITDEYKVPSKKFKVL |
| | Editor[NLS]- | GNTDRHSIKKNLIGALLFDSGETAEATRLKRTARRRYTRRKNRICYLQEIFS |
| | [Cas9(H840A)]-[linker]- | NEMAKVDDSFFHRLEESFLVEEDKKHERHPIFGNIVDEVAYHEKYPTIYHLR |
| | [MMLV_RT(D200N)(T330P) | KKLVDSTDKADLRLIYLALAHMIKFRGHFLIEGDLNPDNSDVDKLFIQLVQT |
| | (L603W)(T306K)(W313F)]- | YNQLFEENPINASGVDAKAILSARLSKSRRLENLIAQLPGEKKNGLFGNLIA |
| | [NLS] | LSLGLTPNFKSNFDLAEDAKLQLSKDTYDDDLDNLLAQIGDQYADLFLAAKN |
| | | LSDAILLSDILRVNTEITKAPLSASMIKRYDEHHQDLTLLKALVRQQLPEKY |
| | | KEIFFDQSKNGYAGYIDGGASQEEFYKFIKPILEKMDGTEELLVKLNREDLL |
| | | RKQRTFDNGSIPHQIHLGELHAILRRQEDFYPFLKDNREKIEKILTFRIPYY |
| | | VGPLARGNSRFAWMTRKSEETITPWNFEEVVDKGASAQSFIERMTNFDKNLP |
| | | NEKVLPKHSLLYEYFTVYNELTKVKYVTEGMRKPAFLSGEQKKAIVDLLFKT |
| | | NRKVTVKQLKEDYFKKIECFDSVEISGVEDRFNASLGTYHDLLKIIKDKDFL |
| | | DNEENEDILEDIVLTLTLFEDREMIEERLKTYAHLFDDKVMKQLKRRRYTGW |
| | | GRLSRKLINGIRDKQSGKTILDFLKSDGFANRNFMQLIHDDSLTFKEDIQKA |
| | | QVSGQGDSLHEHIANLAGSPAIKKGILQTVKVVDELVKVMGRHKPENIVIEM |
| | | ARENQTTQKGQKNSRERMKRIEEGIKELGSQILKEHPVENTQLQNEKLYLYY |
| | | LQNGRDMYVDQELDINRLSDYDVDAIVPQSFLKDDSIDNKVLTRSDKNRGKS |
| | | DNVPSEEVVKKMKNYWRQLLNAKLITQRKFDNLTKAERGGLSELDKAGFIKR |
| | | QLVETRQITKHVAQILDSRMNTKYDENDKLIREVKVITLKSKLVSDFRKDFQ |
| | | FYKVREINNYHHAHDAYLNAVVGTALIKKYPKLESEFVYGDYKVYDVRKMIA |
| | | KSEQEIGKATAKYFFYSNIMNFFKTEITLANGEIRKRPLIETNGETGEIVWD |
| | | KGRDFATVRKVLSMPQVNIVKKTEVQTGGFSKESILPKRNSDKLIARKKDWD |
| | | PKKYGGFDSPTVAYSVLVVAKVEKGKSKKLKSVKELLGITIMERSSFEKNPI |
| | | DFLEAKGYKEVKKDLIIKLPKYSLFELENGRKRMLASAGELQKGNELALPSK |
| | | YVNFLYLASHYEKLKGSPEDNEQKQLFVEQHKHYLDEIIEQISEFSKRVILA |
| | | DANLDKVLSAYNKHRDKPIREQAENIIHLFTLTNLGAPAAFKYFDTTIDRKR |
| | | YTSTKEVLDATLIHQSITGLYETRIDLSQLGGDSGGSSGGSSGSETPGTSES |
| | | ATPESSGGSSGGSSTLNIEDEYRLHETSKEPDVSLGSTWLSDFPQAWAETGG |
| | | MGLAVRQAPLIIPLKATSTPVSIKQYPMSQEARLGIKPHIQRLLDQGILVPC |
| | | QSPWNTPLLPVKKPGTNDYRPVQDLREVNKRVEDIHPTVPNPYNLLSGLPPS |
| | | HQWYTVLDLKDAFFCLRLHPTSQPLFAFEWRDPEMGISGQLTWTRLPQGFKN |
| | | SPTLFNEALHRDLADFRIQHPDLILLQYVDDLLLAATSELDCQQGTRALLQT |
| | | LGNLGYRASAKKAQICQKQVKYLGYLLKEGQRWLTEARKETVMGQPTPKTPR |
| | | QLREFLGKAGFCRLFIPGFAEMAAPLYPLTKPGTLFNWGPDQQKAYQEIKQA |
| | | LLTAPALGLPDLTKPFELFVDEKQGYAKGVLTQKLGPWRRPVAYLSKKLDPV |
| | | AAGWPPCLRMVAAIAVLTKDAGKLTMGQPLVILAPHAVEALVKQPPDRWLSN |
| | | ARMTHYQALLLDTDRVQFGPVVALNPATLLPLPEEGLQHNCLDILAEAHGTR |
| | | PDLTDQPLPDADHTWYTDGSSLLQEGQRKAGAAVTTETEVIWAKALPAGTSA |
| | | QRAELIALTQALKMAEGKKLNVYTDSRYAFATAHIHGEIYRRRGWLTSEGKE |
| | | IKNKDEILALLKALFLPKRLSIIHCPGHQKGHSAEARGNRMADQAARKAAIT |
| | | ETPDTSTLLIENSSPSGGSKRTADGSEFEPKKKRKV |
| 14875 | -N-terminal NLS | MKRTADGSEFESPKKKRKV |
| 14831 | -CAS9(H840A) | DKKYSIGLDIGTNSVGWAVITDEYKVPSKKFKVLGNTDRHSIKKNLIGALLF |
| | | DSGETAEATRLKRTARRRYTRRKNRICYLQEIFSNEMAKVDDSFFHRLEESF |
| | | LVEEDKKHERHPIFGNIVDEVAYHEKYPTIYHLRKKLVDSTDKADLRLIYLA |
| | | LAHMIKFRGHFLIEGDLNPDNSDVDKLFIQLVQTYNQLFEENPINASGVDAK |
| | | AILSARLSKSRRLENLIAQLPGEKKNGLFGNLIALSLGLTPNFKSNFDLAED |
| | | AKLQLSKDTYDDDLDNLLAQIGDQYADLFLAAKNLSDAILLSDILRVNTEIT |
| | | KAPLSASMIKRYDEHHQDLTLLKALVRQQLPEKYKEIFFDQSKNGYAGYIDG |
| | | GASQEEFYKFIKPILEKMDGTEELLVKLNREDLLRKQRTFDNGSIPHQIHLG |
| | | ELHAILRRQEDFYPFLKDNREKIEKILTFRIPYYVGPLARGNSRFAWMTRKS |
| | | EETITPWNFEEVVDKGASAQSFIERMTNFDKNLPNEKVLPKHSLLYEYFTVY |
| | | NELTKVKYVTEGMRKPAFLSGEQKKAIVDLLFKTNRKVTVKQLKEDYFKKIE |
| | | CFDSVEISGVEDRFNASLGTYHDLLKIIKDKDFLDNEENEDILEDIVLTLTL |
| | | FEDREMIEERLKTYAHLFDDKVMKQLKRRRYTGWGRLSRKLINGIRDKQSGK |
| | | TILDFLKSDGFANRNFMQLIHDDSLTFKEDIQKAQVSGQGDSLHEHIANLAG |
| | | SPAIKKGILQTVKVVDELVKVMGRHKPENIVIEMARENQTTQKGQKNSRERM |
| | | KRIEEGIKELGSQILKEHPVENTQLQNEKLYLYYLQNGRDMYVDQELDINRL |
| | | SDYDVDAIVPQSFLKDDSIDNKVLTRSDKNRGKSDNVPSEEVVKKMKNYWRQ |
| | | LLNAKLITQRKFDNLTKAERGGLSELDKAGFIKRQLVETRQITKHVAQILDS |
| | | RMNTKYDENDKLIREVKVITLKSKLVSDFRKDFQFYKVREINNYHHAHDAYL |
| | | NAVVGTALIKKYPKLESEFVYGDYKVYDVRKMIAKSEQEIGKATAKYFFYSN |
| | | IMNFFKTEITLANGEIRKRPLIETNGETGEIVWDKGRDFATVRKVLSMPQVN |
| | | IVKKTEVQTGGFSKESILPKRNSDKLIARKKDWDPKKYGGFDSPTVAYSVLV |
| | | VAKVEKGKSKKLKSVKELLGITIMERSSFEKNPIDFLEAKGYKEVKKDLIIK |
| | | LPKYSLFELENGRKRMLASAGELQKGNELALPSKYVNFLYLASHYEKLKGSP |
| | | EDNEQKQLFVEQHKHYLDEIIEQISEFSKRVILADANLDKVLSAYNKHRDKP |
| | | IREQAENIIHLFTLTNLGAPAAFKYFDTTIDRKRYTSTKEVLDATLIHQSIT |
| | | GLYETRIDLSQLGGD |
| 14890 | -linker between CAS9 | SGGSSGGSSGSETPGTSESATPESSGGSSGGSS |
| | domain and RT domain | |
| | (33 amino acids) | |
| 14828 | MMLV_RT D200N | TLNIEDEYRLHETSKEPDVSLGSTWLSDFPQAWAETGGMGLAVRQAPLIIPL |
| | T330P L603W T306K | KATSTPVSIKQYPMSQEARLGIKPHIQRLLDQGILVPCQSPWNTPLLPVKKP |
| | W313F | GTNDYRPVQDLREVNKRVEDIHPTVPNPYNLLSGLPPSHQWYTVLDLKDAFF |
| | | CLRLHPTSQPLFAFEWRDPEMGISGQLTWTRLPQGFKNSPTLFNEALHRDLA |
| | | DFRIQHPDLILLQYVDDLLLAATSELDCQQGTRALLQTLGNLGYRASAKKAQ |
| | | ICQKQVKYLGYLLKEGQRWLTEARKETVMGQPTPKTPRQLREFLGKAGFCRL |
| | | FIPGFAEMAAPLYPLTKPGTLFNWGPDQQKAYQEIKQALLTAPALGLPDLTK |
| | | PFELFVDEKQGYAKGVLTQKLGPWRRPVAYLSKKLDPVAAGWPPCLRMVAAI |
| | | AVLTKDAGKLTMGQPLVILAPHAVEALVKQPPDRWLSNARMTHYQALLLDTD |
| | | RVQFGPVVALNPATLLPLPEEGLQHNCLDILAEAHGTRPDLTDQPLPDADHT |
| | | WYTDGSSLLQEGQRKAGAAVTTETEVIWAKALPAGTSAQRAELIALTQALKM |
| | | AEGKKLNVYTDSRYAFATAHIHGEIYRRRGWLTSEGKEIKNKDEILALLKAL |
| | | FLPKRLSIIHCPGHQKGHSAEARGNRMADQAARKAAITETPDTSTLLIENSS |
| | | P |
| 14879 | -C-terminal NLS | SGGSKRTADGSEFEPKKKRKV |

TABLE 91
lists exemplary prime editor and its components

| SEQ ID | | |
|---|---|---|
| NO. | DESCRIPTION | SEQUENCE |
| 14874 | Exemplary prime editor | MKRTADGSEFESPKKKRKVDKKYSIGLDIGTNSVGWAVITDEYKVPSKKFKV |
| | [NLS]-[Cas9((R220K) | LGNTDRHSIKKNLIGALLFDSGETAEATRLKRTARRRYTRRKNRICYLQEIF |
| | (R393K)(H839A)]- | SNEMAKVDDSFFHRLEESFLVEEDKKHERHPIFGNIVDEVAYHEKYPTIYHL |
| | [linker]- | RKKLVDSTDKADLRLIYLALAHMIKFRGHFLIEGDLNPDNSDVDKLFIQLVQ |
| | [MMLV_RT(D200N) | TYNQLFEENPINASGVDAKAILSARLSKSRKLENLIAQLPGEKKNGLFGNLI |
| | (T330P)(L603W)(T306K) | ALSLGLTPNFKSNFDLAEDAKLQLSKDTYDDDLDNLLAQIGDQYADLFLAAK |
| | (W313F)]-[NLS] | NLSDAILLSDILRVNTEITKAPLSASMIKRYDEHHQDLTLLKALVRQQLPEK |
| | | YKEIFFDQSKNGYAGYIDGGASQEEFYKFIKPILEKMDGTEELLVKLKREDL |
| | | LRKQRTFDNGSIPHQIHLGELHAILRRQEDFYPFLKDNREKIEKILTFRIPY |
| | | YVGPLARGNSRFAWMTRKSEETITPWNFEEVVDKGASAQSFIERMTNFDKNL |
| | | PNEKVLPKHSLLYEYFTVYNELTKVKYVTEGMRKPAFLSGEQKKAIVDLLFK |
| | | TNRKVTVKQLKEDYFKKIECFDSVEISGVEDRFNASLGTYHDLLKIIKDKDF |
| | | LDNEENEDILEDIVLTLTLFEDREMIEERLKTYAHLFDDKVMKQLKRRRYTG |
| | | WGRLSRKLINGIRDKQSGKTILDFLKSDGFANRNFMQLIHDDSLTFKEDIQK |
| | | AQVSGQGDSLHEHIANLAGSPAIKKGILQTVKVVDELVKVMGRHKPENIVIE |
| | | MARENQTTQKGQKNSRERMKRIEEGIKELGSQILKEHPVENTQLQNEKLYLY |
| | | YLQNGRDMYVDQELDINRLSDYDVDAIVPQSFLKDDSIDNKVLTRSDKNRGK |
| | | SDNVPSEEVVKKMKNYWRQLLNAKLITQRKFDNLTKAERGGLSELDKAGFIK |
| | | RQLVETRQITKHVAQILDSRMNTKYDENDKLIREVKVITLKSKLVSDFRKDF |
| | | QFYKVREINNYHHAHDAYLNAVVGTALIKKYPKLESEFVYGDYKVYDVRKMI |
| | | AKSEQEIGKATAKYFFYSNIMNFFKTEITLANGEIRKRPLIETNGETGEIVW |
| | | DKGRDFATVRKVLSMPQVNIVKKTEVQTGGFSKESILPKRNSDKLIARKKDW |
| | | DPKKYGGFDSPTVAYSVLVVAKVEKGKSKKLKSVKELLGITIMERSSFEKNP |
| | | IDFLEAKGYKEVKKDLIIKLPKYSLFELENGRKRMLASAGELQKGNELALPS |
| | | KYVNFLYLASHYEKLKGSPEDNEQKQLFVEQHKHYLDEIIEQISEFSKRVIL |
| | | ADANLDKVLSAYNKHRDKPIREQAENIIHLFTLTNLGAPAAFKYFDTTIDRK |
| | | RYTSTKEVLDATLIHQSITGLYETRIDLSQLGGDSGGSSGGSKRTADGSEFE |
| | | SPKKKRKVSGGSSGGSTLNIEDEYRLHETSKEPDVSLGSTWLSDFPQAWAET |
| | | GGMGLAVROAPLIIPLKATSTPVSIKQYPMSQEARLGIKPHIQRLLDQGILV |
| | | PCQSPWNTPLLPVKKPGTNDYRPVQDLREVNKRVEDIHPTVPNPYNLLSGLP |
| | | PSHQWYTVLDLKDAFFCLRLHPTSQPLFAFEWRDPEMGISGQLTWTRLPQGF |
| | | KNSPTLFNEALHRDLADFRIQHPDLILLQYVDDLLLAATSELDCQQGTRALL |
| | | QTLGNLGYRASAKKAQICQKQVKYLGYLLKEGQRWLTEARKETVMGQPTPKT |
| | | PROLREFLGKAGFCRLFIPGFAEMAAPLYPLTKPGTLFNWGPDQOKAYQEIK |
| | | QALLTAPALGLPDLTKPFELFVDEKQGYAKGVLTQKLGPWRRPVAYLSKKLD |
| | | PVAAGWPPCLRMVAAIAVLTKDAGKLTMGQPLVILAPHAVEALVKOPPDRWL |
| | | SNARMTHYQALLLDTDRVOFGPVVALNPATLLPLPEEGLQHNCLDILAEAHG |
| | | TRPDLTDOPLPDADHTWYTDGSSLLQEGORKAGAAVTTETEVIWAKALPAGT |
| | | SAQRAELIALTOALKMAEGKKLNVYTDSRYAFATAHIHGEIYRRRGWLTSEG |
| | | KEIKNKDEILALLKALFLPKRLSIIHCPGHQKGHSAEARGNRMADQAARKAA |
| | | ITETPDTSTLLIENSSPSGGSKRTADGSEFESPKKKRKVGSGPAAKRVKLD |
| | | KEY: |
| | | N-terminal bipartiteSV40NLS |
| | | CAS9(R221K N394K H840A) |
| | | SGGSx2-met-bpSV40NLS-SGGSx2 LINKER |
| | | M-MLV D200N T306K W313F T330P L603W REVERSE |
| | | TRANSCRIPTASE |
| | | C-terminal linker- NLS1 |
| | | C-terminal linker-NLS2 |
| 14900 | Met-Exemplaryprime | KRTADGSEFESPKKKRKVDKKYSIGLDIGTNSVGWAVITDEYKVPSKKFKVL |
| | editor[NLS]- | GNTDRHSIKKNLIGALLFDSGETAEATRLKRTARRRYTRRKNRICYLQEIFS |
| | [Cas9((R220K)(R393K) | NEMAKVDDSFFHRLEESFLVEEDKKHERHPIFGNIVDEVAYHEKYPTIYHLR |
| | (H839A)]-[linker]- | KKLVDSTDKADLRLIYLALAHMIKFRGHFLIEGDLNPDNSDVDKLFIQLVQT |
| | [MMLV_RT(D200N) | YNQLFEENPINASGVDAKAILSARLSKSRKLENLIAQLPGEKKNGLFGNLIA |
| | (T330P)(L603W)(T306K) | LSLGLTPNFKSNFDLAEDAKLQLSKDTYDDDLDNLLAQIGDQYADLFLAAKN |
| | (W313F)]-[NLS] | LSDAILLSDILRVNTEITKAPLSASMIKRYDEHHQDLTLLKALVRQQLPEKY |
| | | KEIFFDQSKNGYAGYIDGGASQEEFYKFIKPILEKMDGTEELLVKLKREDLL |
| | | RKQRTFDNGSIPHQIHLGELHAILRRQEDFYPFLKDNREKIEKILTFRIPYY |
| | | VGPLARGNSRFAWMTRKSEETITPWNFEEVVDKGASAQSFIERMTNFDKNLP |
| | | NEKVLPKHSLLYEYFTVYNELTKVKYVTEGMRKPAFLSGEQKKAIVDLLFKT |
| | | NRKVTVKQLKEDYFKKIECFDSVEISGVEDRFNASLGTYHDLLKIIKDKDFL |
| | | DNEENEDILEDIVLTLTLFEDREMIEERLKTYAHLFDDKVMKQLKRRRYTGW |
| | | GRLSRKLINGIRDKQSGKTILDFLKSDGFANRNFMQLIHDDSLTFKEDIQKA |
| | | QVSGQGDSLHEHIANLAGSPAIKKGILQTVKVVDELVKVMGRHKPENIVIEM |
| | | ARENQTTQKGQKNSRERMKRIEEGIKELGSQILKEHPVENTQLQNEKLYLYY |
| | | LQNGRDMYVDQELDINRLSDYDVDAIVPQSFLKDDSIDNKVLTRSDKNRGKS |
| | | DNVPSEEVVKKMKNYWRQLLNAKLITQRKFDNLTKAERGGLSELDKAGFIKR |
| | | QLVETRQITKHVAQILDSRMNTKYDENDKLIREVKVITLKSKLVSDFRKDFQ |
| | | FYKVREINNYHHAHDAYLNAVVGTALIKKYPKLESEFVYGDYKVYDVRKMIA |
| | | KSEQEIGKATAKYFFYSNIMNFFKTEITLANGEIRKRPLIETNGETGEIVWD |
| | | KGRDFATVRKVLSMPQVNIVKKTEVQTGGFSKESILPKRNSDKLIARKKDWD |
| | | PKKYGGFDSPTVAYSVLVVAKVEKGKSKKLKSVKELLGITIMERSSFEKNPI |
| | | DFLEAKGYKEVKKDLIIKLPKYSLFELENGRKRMLASAGELQKGNELALPSK |
| | | YVNFLYLASHYEKLKGSPEDNEQKQLFVEQHKHYLDEIIEQISEFSKRVILA |
| | | DANLDKVLSAYNKHRDKPIREQAENIIHLFTLTNLGAPAAFKYFDTTIDRKR |
| | | YTSTKEVLDATLIHQSITGLYETRIDLSQLGGDSGGSSGGSKRTADGSEFES |
| | | PKKKRKVSGGSSGGSTLNIEDEYRLHETSKEPDVSLGSTWLSDFPQAWAETG |
| | | GMGLAVRQAPLIIPLKATSTPVSIKQYPMSQEARLGIKPHIQRLLDQGILVP |
| | | CQSPWNTPLLPVKKPGTNDYRPVQDLREVNKRVEDIHPTVPNPYNLLSGLPP |
| | | SHQWYTVLDLKDAFFCLRLHPTSQPLFAFEWRDPEMGISGQLTWTRLPQGFK |
| | | NSPTLFNEALHRDLADFRIQHPDLILLQYVDDLLLAATSELDCQQGTRALLQ |
| | | TLGNLGYRASAKKAQICQKQVKYLGYLLKEGQRWLTEARKETVMGQPTPKTP |
| | | RQLREFLGKAGFCRLFIPGFAEMAAPLYPLTKPGTLFNWGPDQQKAYQEIKQ |
| | | ALLTAPALGLPDLTKPFELFVDEKQGYAKGVLTQKLGPWRRPVAYLSKKLDP |
| | | VAAGWPPCLRMVAAIAVLTKDAGKLTMGQPLVILAPHAVEALVKQPPDRWLS |
| | | NARMTHYQALLLDTDRVQFGPVVALNPATLLPLPEEGLQHNCLDILAEAHGT |
| | | RPDLTDQPLPDADHTWYTDGSSLLQEGQRKAGAAVTTETEVIWAKALPAGTS |
| | | AQRAELIALTQALKMAEGKKLNVYTDSRYAFATAHIHGEIYRRRGWLTSEGK |
| | | EIKNKDEILALLKALFLPKRLSIIHCPGHQKGHSAEARGNRMADQAARKAAI |
| | | TETPDTSTLLIENSSPSGGSKRTADGSEFESPKKKRKVGSGPAAKRVKLD |
| 14875 | -N-terminal bpSV40NLS | MKRTADGSEFESPKKKRKV |
| 14876 | -CAS9(R221K N394K | DKKYSIGLDIGTNSVGWAVITDEYKVPSKKFKVLGNTDRHSIKKNLIGALLF |
| | H840A) | DSGETAEATRLKRTARRRYTRRKNRICYLQEIFSNEMAKVDDSFFHRLEESF |
| | | LVEEDKKHERHPIFGNIVDEVAYHEKYPTIYHLRKKLVDSTDKADLRLIYLA |
| | | LAHMIKFRGHFLIEGDLNPDNSDVDKLFIQLVQTYNQLFEENPINASGVDAK |
| | | AILSARLSKSRKLENLIAQLPGEKKNGLFGNLIALSLGLTPNFKSNFDLAED |
| | | AKLQLSKDTYDDDLDNLLAQIGDQYADLFLAAKNLSDAILLSDILRVNTEIT |
| | | KAPLSASMIKRYDEHHQDLTLLKALVRQQLPEKYKEIFFDQSKNGYAGYIDG |
| | | GASQEEFYKFIKPILEKMDGTEELLVKLKREDLLRKQRTFDNGSIPHQIHLG |
| | | ELHAILRRQEDFYPFLKDNREKIEKILTFRIPYYVGPLARGNSRFAWMTRKS |
| | | EETITPWNFEEVVDKGASAQSFIERMTNFDKNLPNEKVLPKHSLLYEYFTVY |
| | | NELTKVKYVTEGMRKPAFLSGEQKKAIVDLLFKTNRKVTVKQLKEDYFKKIE |
| | | CFDSVEISGVEDRFNASLGTYHDLLKIIKDKDFLDNEENEDILEDIVLTLTL |
| | | FEDREMIEERLKTYAHLFDDKVMKQLKRRRYTGWGRLSRKLINGIRDKQSGK |
| | | TILDFLKSDGFANRNFMQLIHDDSLTFKEDIQKAQVSGQGDSLHEHIANLAG |
| | | SPAIKKGILQTVKVVDELVKVMGRHKPENIVIEMARENQTTQKGQKNSRERM |
| | | KRIEEGIKELGSQILKEHPVENTQLQNEKLYLYYLQNGRDMYVDQELDINRL |
| | | SDYDVDAIVPQSFLKDDSIDNKVLTRSDKNRGKSDNVPSEEVVKKMKNYWRQ |
| | | LLNAKLITQRKFDNLTKAERGGLSELDKAGFIKRQLVETRQITKHVAQILDS |
| | | RMNTKYDENDKLIREVKVITLKSKLVSDFRKDFQFYKVREINNYHHAHDAYL |
| | | NAVVGTALIKKYPKLESEFVYGDYKVYDVRKMIAKSEQEIGKATAKYFFYSN |
| | | IMNFFKTEITLANGEIRKRPLIETNGETGEIVWDKGRDFATVRKVLSMPQVN |
| | | IVKKTEVQTGGFSKESILPKRNSDKLIARKKDWDPKKYGGFDSPTVAYSVLV |
| | | VAKVEKGKSKKLKSVKELLGITIMERSSFEKNPIDFLEAKGYKEVKKDLIIK |
| | | LPKYSLFELENGRKRMLASAGELQKGNELALPSKYVNFLYLASHYEKLKGSP |
| | | EDNEQKQLFVEQHKHYLDEIIEQISEFSKRVILADANLDKVLSAYNKHRDKP |
| | | IREQAENIIHLFTLTNLGAPAAFKYFDTTIDRKRYTSTKEVLDATLIHQSIT |
| | | GLYETRIDLSQLGGD |
| 14877 | -SGGSx2-bpSV40NLS- | SGGSSGGSKRTADGSEFESPKKKRKVSGGSSGGS |
| | SGGSx2 linker | |
| 14828 | -MMLV_RT D200N | TLNIEDEYRLHETSKEPDVSLGSTWLSDFPQAWAETGGMGLAVRQAPLIIPL |
| | T330P L603W T306K | KATSTPVSIKQYPMSQEARLGIKPHIQRLLDQGILVPCQSPWNTPLLPVKKP |
| | W313F | GTNDYRPVQDLREVNKRVEDIHPTVPNPYNLLSGLPPSHQWYTVLDLKDAFF |
| | | CLRLHPTSQPLFAFEWRDPEMGISGQLTWTRLPQGFKNSPTLFNEALHRDLA |
| | | DFRIQHPDLILLQYVDDLLLAATSELDCQQGTRALLQTLGNLGYRASAKKAQ |
| | | ICQKQVKYLGYLLKEGQRWLTEARKETVMGQPTPKTPRQLREFLGKAGFCRL |
| | | FIPGFAEMAAPLYPLTKPGTLFNWGPDQQKAYQEIKQALLTAPALGLPDLTK |
| | | PFELFVDEKQGYAKGVLTQKLGPWRRPVAYLSKKLDPVAAGWPPCLRMVAAI |
| | | AVLTKDAGKLTMGQPLVILAPHAVEALVKQPPDRWLSNARMTHYQALLLDTD |
| | | RVQFGPVVALNPATLLPLPEEGLQHNCLDILAEAHGTRPDLTDQPLPDADHT |
| | | WYTDGSSLLQEGQRKAGAAVTTETEVIWAKALPAGTSAQRAELIALTQALKM |
| | | AEGKKLNVYTDSRYAFATAHIHGEIYRRRGWLTSEGKEIKNKDEILALLKAL |
| | | FLPKRLSIIHCPGHQKGHSAEARGNRMADQAARKAAITETPDTSTLLIENSS |
| | | P |
| 14879 | C-terminal linker-NLS | SGGSKRTADGSEFESPKKKRKV |
| 14880 | C-terminal linker-NLS2 | GSGPAAKRVKLD |

PEgRNA for editing of ATP7B Gene

[0216] The term “prime editing guide RNA”, or “PEgRNA”, refers to a guide polynucleotide that comprises one or more intended nucleotide edits for incorporation into the target DNA. In some embodiments, the PEgRNA associates with and directs a prime editor to incorporate the one or more intended nucleotide edits into the target gene via prime editing. “Nucleotide edit” or “intended nucleotide edit” refers to a specified deletion of one or more nucleotides at one specific position, insertion of one or more nucleotides at one specific position, substitution of a single nucleotide, or other alterations at one specific position to be incorporated into the sequence of the target gene. Intended nucleotide edit may refer to the edit on the editing template as compared to the sequence on the target strand of the target gene or may refer to the edit encoded by the editing template on the newly synthesized single stranded DNA that replaces the editing target sequence, as compared to the editing target sequence. In some embodiments, a PEgRNA comprises a spacer sequence that is complementary or substantially complementary to a search target sequence on a target strand of the target gene. In some embodiments, the PEgRNA comprises a gRNA core that associates with a DNA binding domain, e.g., a CRISPR-Cas protein domain, of a prime editor. In some embodiments, the PEgRNA further comprises an extended nucleotide sequence comprising one or more intended nucleotide edits compared to the endogenous sequence of the target gene, wherein the extended nucleotide sequence may be referred to as an extension arm.

[0217] In certain embodiments, the extension arm comprises a primer binding site sequence (PBS) that can initiate target-primed DNA synthesis. In some embodiments, the PBS is complementary or substantially complementary to a free 3′ end on the edit strand of the target gene at a nick site generated by the prime editor. In some embodiments, the extension arm further comprises an editing template that comprises one or more intended nucleotide edits to be incorporated in the target gene by prime editing. In some embodiments, the editing template is a template for an RNA-dependent DNA polymerase domain or polypeptide of the prime editor, for example, a reverse transcriptase domain. The reverse transcriptase editing template may also be referred to herein as an RT template, or RTT. In some embodiments, the editing template comprises partial complementarity to an editing target sequence in the target gene, e.g., an ATP7B gene. In some embodiments, the editing template comprises substantial or partial complementarity to the editing target sequence except at the position of the intended nucleotide edits to be incorporated into the target gene. An exemplary architecture of a PEgRNA including its components is as demonstrated in FIG. 2.

[0218] In some embodiments, a PEgRNA includes only RNA nucleotides and forms an RNA polynucleotide. In some embodiments, a PEgRNA is a chimeric polynucleotide that includes both RNA and DNA nucleotides. For example, a PEgRNA can include DNA in the spacer sequence, the gRNA core, or the extension arm. In some embodiments, a PEgRNA comprises DNA in the spacer sequence. In some embodiments, the entire spacer sequence of a PEgRNA is a DNA sequence. In some embodiments, the PEgRNA comprises DNA in the gRNA core, for example, in a stem region of the gRNA core. In some embodiments, the PEgRNA comprises DNA in the extension arm, for example, in the editing template. An editing template that comprises a DNA sequence may serve as a DNA synthesis template for a DNA polymerase in a prime editor, for example, a DNA-dependent DNA polymerase. Accordingly, the PEgRNA may be a chimeric polynucleotide that comprises RNA in the spacer, gRNA core, and/or the PBS sequences and DNA in the editing template.

[0219] Components of a PEgRNA may be arranged in a modular fashion. In some embodiments, the spacer and the extension arm comprising a primer binding site sequence (PBS) and an editing template, e.g., a reverse transcriptase template (RTT), can be interchangeably located in the 5′ portion of the PEgRNA, the 3′ portion of the PEgRNA, or in the middle of the gRNA core. In some embodiments, a PEgRNA comprises a PBS and an editing template sequence in 5′ to 3′ order. In some embodiments, the gRNA core of a PEgRNA of this disclosure may be located in between a spacer and an extension arm of the PEgRNA. In some embodiments, the gRNA core of a PEgRNA may be located at the 3′ end of a spacer. In some embodiments, the gRNA core of a PEgRNA may be located at the 5′ end of a spacer. In some embodiments, the gRNA core of a PEgRNA may be located at the 3′ end of an extension arm. In some embodiments, the gRNA core of a PEgRNA may be located at the 5′ end of an extension arm. In some embodiments, the PEgRNA comprises, from 5′ to 3′: a spacer, a gRNA core, and an extension arm. In some embodiments, the PEgRNA comprises, from 5′ to 3′: a spacer, a gRNA core, an editing template, and a PBS. In some embodiments, the PEgRNA comprises, from 5′ to 3′: an extension arm, a spacer, and a gRNA core. In some embodiments, the PEgRNA comprises, from 5′ to 3′: an editing template, a PBS, a spacer, and a gRNA core.

[0220] In some embodiments, a PEgRNA comprises a single polynucleotide molecule that comprises the spacer sequence, the gRNA core, and the extension arm. In some embodiments, a PEgRNA comprises multiple polynucleotide molecules, for example, two polynucleotide molecules. In some embodiments, a PEgRNA comprise a first polynucleotide molecule that comprises the spacer and a portion of the gRNA core, and a second polynucleotide molecule that comprises the rest of the gRNA core and the extension arm. In some embodiments, the gRNA core portion in the first polynucleotide molecule and the gRNA core portion in the second polynucleotide molecule are at least partly complementary to each other. In some embodiments, the PEgRNA may comprise a first polynucleotide comprising the spacer and a first portion of a gRNA core comprising, which may be also be referred to as a crRNA. In some embodiments, the PEgRNA comprise a second polynucleotide comprising a second portion of the gRNA core and the extension arm, wherein the second portion of the gRNA core may also be referred to as a trans-activating crRNA, or tracr RNA. In some embodiments, the crRNA portion and the tracr RNA portion of the gRNA core are at least partially complementary to each other. In some embodiments, the partially complementary portions of the crRNA and the tracr RNA form a lower stem, a bulge, and an upper stem, as exemplified in FIG. 4.

[0221] In some embodiments, a spacer sequence comprises a region that has substantial complementarity to a search target sequence on the target strand of a double stranded target DNA, e.g., an AT7B gene. In some embodiments, the spacer sequence of a PEgRNA is identical or substantially identical to a protospacer sequence on the edit strand of the target gene (except that the protospacer sequence comprises thymine and the spacer sequence may comprise uracil). In some embodiments, the spacer sequence is at least about 70%, 75%, 80%, 85%, 90%, 95%, or 100% complementary to a search target sequence in the target gene. In some embodiments, the spacer comprises is substantially complementary to the search target sequence.

[0222] In some embodiments, the length of the spacer varies from about 10 to about 100 nucleotides. In some embodiments, the spacer is 16 nucleotides, 17 nucleotides, 18 nucleotides, 19 nucleotides, 20 nucleotides, 21 nucleotides, 22 nucleotides, 23 nucleotides, 24 nucleotides, or 25 nucleotides in length. In some embodiments, the spacer is from 15 nucleotides to 30 nucleotides in length, 15 to 25 nucleotides in length, 18 to 22 nucleotides in length, 10 to 20 nucleotides in length, or 20 to 30 nucleotides in length. In some embodiments, the spacer is 16 to 22 nucleotides in length. In some embodiments, the spacer is 16 to 20 nucleotides in length. In some embodiments, the spacer is 17 to 18 nucleotides in length. In some embodiments, the spacer is 20 nucleotides in length.

[0223] As used herein in a PEgRNA or a nick guide RNA sequence, or fragments thereof such as a spacer, PBS, or RT sequence, unless indicated otherwise, it should be appreciated that the letter “T” or “thymine” indicates a nucleobase in a DNA sequence that encodes the PEgRNA or guide RNA sequence, and is intended to refer to a uracil (U) nucleobase of the PEgRNA or guide RNA or any chemically modified uracil nucleobase known in the art, such as 5-methoxyuracil.

[0224] The extension arm of a PEgRNA may comprise a primer binding site (PBS) and an editing template (e.g., an RTT). The extension arm may be partially complementary to the spacer. In some embodiments, the editing template (e.g., RTT) is partially complementary to the spacer. In some embodiments, the editing template (e.g., RTT) and the primer binding site (PBS) are each partially complementary to the spacer.

[0225] An extension arm of a PEgRNA may comprise a primer binding site sequence (PBS, or PBS sequence) that comprises complementarity to and can hybridize with a free 3′ end of a single stranded DNA in the target gene (e.g., the ATP7B gene) generated by nicking with a prime editor at the nick site on the PAM strand.

[0226] The length of the PBS sequence may vary depending on, e.g., the prime editor components, the search target sequence and other components of the PEgRNA. In some embodiments, the PBS is about 3 to 19 nucleotides in length, in some embodiments, the PBS is about 3 to 17 nucleotides in length. In some embodiments, the PBS is about 4 to 16 nucleotides, about 6 to 16 nucleotides, about 6 to 18 nucleotides, about 6 to 20 nucleotides, about 8 to 20 nucleotides, about 10 to 20 nucleotides, about 12 to 20 nucleotides, about 14 to 20 nucleotides, about 16 to 20 nucleotides, or about 18 to 20 nucleotides in length. In some embodiments, the PBS is 8 to 17 nucleotides in length. In some embodiments, the PBS is 8 to 16 nucleotides in length. In some embodiments, the PBS is 8 to 15 nucleotides in length. In some embodiments, the PBS is 8 to 14 nucleotides in length. In some embodiments, the PBS is 8 to 13 nucleotides in length. In some embodiments, the PBS is 8 to 12 nucleotides in length. In some embodiments, the PBS is 8 to 11 nucleotides in length. In some embodiments, the PBS is 8 to 10 nucleotides in length. In some embodiments, the PBS is 8 or 9 nucleotides in length. In some embodiments, the PBS is 16 or 17 nucleotides in length. In some embodiments, the PBS is 15 to 17 nucleotides in length. In some embodiments, the PBS is 14 to 17 nucleotides in length. In some embodiments, the PBS is 13 to 17 nucleotides in length. In some embodiments, the PBS is 12 to 17 nucleotides in length. In some embodiments, the PBS is 11 to 17 nucleotides in length. In some embodiments, the PBS is 10 to 17 nucleotides in length. In some embodiments, the PBS is 9 to 17 nucleotides in length. In some embodiments, the PBS is about 7 to 15 nucleotides in length. In some embodiments, the PBS is 6, 7, 8, 9, 10, 11, 12, 13, 14, 15, 16, 17, 18, or 19 nucleotides in length. In some embodiments, the PBS is 8, 9, 10, 11, 12, 13, or 14 nucleotides in length.

[0227] The PBS may be complementary or substantially complementary to a DNA sequence in the edit strand of the target gene. By annealing with the edit strand at a free hydroxy group, e.g., a free 3′ end generated by prime editor nicking, the PBS may initiate synthesis of a new single stranded DNA encoded by the editing template at the nick site. In some embodiments, the PBS is at least about 70%, 75%, 80%, 85%, 90%, 95%, or 100% complementary to a region of the edit strand of the target gene (e.g., the ATP7B gene). In some embodiments, the PBS is perfectly complementary, or 100% complementary, to a region of the edit strand of the target gene (e.g., the ATP7B gene).

[0228] An extension arm of a PEgRNA may comprise an editing template that serves as a DNA synthesis template for the DNA polymerase in a prime editor during prime editing.

[0229] The length of an editing template may vary depending on, e.g., the prime editor components, the search target sequence and other components of the PEgRNA. In some embodiments, the editing template serves as a DNA synthesis template for a reverse transcriptase, and the editing template is referred to as a reverse transcription editing template (RTT).

[0230] The editing template (e.g., RTT), in some embodiments, is 2, 3, 4, 5, 6, 7, 8, 9, 10, 11, 12, 13, 14, 15, 16, 17, 18, 19, 20, 21, 22, 23, 24, or 25 nucleotides in length. In some embodiments, the RTT is 12, 13, 14, 15, 16, 17, 18, 19, 20, 21, 22, 23, 24, or 25 nucleotides in length. In some embodiments, the RTT is 16, 17, 18, 19, 20, 21, 22, 23, 24, 25, 26, 27, 28, 29, 30, 31, 32, 33, 34, 35, 36, 37, 38, 39, or 40 nucleotides in length. In some embodiments, the RTT is 16, 17, 18, 19, 20, 21, 22, 23, 24, 25, 26, 27, 28, 29, 30, 31, 32, 33, 34, 35, 36, 37, 38, 39, 40, 41, 42, 43, 44, 45, 46, 47, 48, 49, 50, 51, 52, 53, 54, 55, 56, 57, 58, 59, 60, 61, 62, 63, 64, 65, 66, 67, 68, 69, 70, 71, 72, 73, 74, 75, 76, 77, 78, 79, or 80 nucleotides in length.

[0231] In some embodiments, the editing template (e.g., RU) sequence is about 70%, 75%, 80%, 85%, 90%, 95%, or 99% complementary to the editing target sequence on the edit strand of the target gene. In some embodiments, the editing template sequence (e.g., RU) is substantially complementary to the editing target sequence. In some embodiments, the editing template sequence (e.g., RU) is complementary to the editing target sequence except at positions of the intended nucleotide edits to be incorporated in the target gene. In some embodiments, the editing template comprises a nucleotide sequence comprising about 85% to about 95% complementarity to an editing target sequence in the edit strand in the target gene (e.g., the ATP7B gene). In some embodiments, the editing template comprises about 86%, about 87%, about 88%, about 89%, about 90%, about 91%, about 92%, about 93%, about 94%, about 95%, about 96%, about 97%, about 98%, or about 99% complementarity to an editing target sequence in the edit strand of the target gene (e.g., the ATP7B gene).

[0232] An intended nucleotide edit in an editing template of a PEgRNA may comprise various types of alterations as compared to the target gene sequence. In some embodiments, the nucleotide edit is a single nucleotide substitution as compared to the target gene sequence. In some embodiments, the nucleotide edit is a deletion as compared to the target gene sequence. In some embodiments, the nucleotide edit is an insertion as compared to the target gene sequence. In some embodiments, the editing template comprises one to ten intended nucleotide edits as compared to the target gene sequence. In some embodiments, the editing template comprises one or more intended nucleotide edits as compared to the target gene sequence. In some embodiments, the editing template comprises two or more intended nucleotide edits as compared to the target gene sequence. In some embodiments, the editing template comprises three or more intended nucleotide edits as compared to the target gene sequence. In some embodiments, the editing template comprises four or more, five or more, or six or more intended nucleotide edits as compared to the target gene sequence. In some embodiments, the editing template comprises two single nucleotide substitutions, insertions, deletions, or any combination thereof, as compared to the target gene sequence. In some embodiments, the editing template comprises three single nucleotide substitutions, insertions, deletions, or any combination thereof, as compared to the target gene sequence. In some embodiments, the editing template comprises four, five, or six single nucleotide substitutions, insertions, deletions, or any combination thereof, as compared to the target gene sequence. In some embodiments, a nucleotide substitution comprises an adenine (A)-to-thymine (T) substitution. In some embodiments, a nucleotide substitution comprises an A-to-guanine (G) substitution. In some embodiments, a nucleotide substitution comprises an A-to-cytosine (C) substitution. In some embodiments, a nucleotide substitution comprises a T-A substitution. In some embodiments, a nucleotide substitution comprises a T-G substitution. In some embodiments, a nucleotide substitution comprises a T-C substitution. In some embodiments, a nucleotide substitution comprises a G-to-A substitution. In some embodiments, a nucleotide substitution comprises a G-to-T substitution. In some embodiments, a nucleotide substitution comprises a G-to-C substitution. In some embodiments, a nucleotide substitution comprises a C-to-A substitution. In some embodiments, a nucleotide substitution comprises a C-to-T substitution. In some embodiments, a nucleotide substitution comprises a C-to-G substitution.

[0233] In some embodiments, a nucleotide insertion is at least 5 nucleotides, at least 6 nucleotides, at least 7 nucleotides, at least 8 nucleotides, at least 9 nucleotides, at least 10 nucleotides, at least 11 nucleotides, at least 12 nucleotides, at least 13 nucleotides, at least 14 nucleotides, at least 15 nucleotides, at least 16 nucleotides, at least 17 nucleotides, at least 18 nucleotides, at least 19 nucleotides, or at least 20 nucleotides in length. In some embodiments, a nucleotide insertion is from 1 to 2 nucleotides, from 1 to 3 nucleotides, from 1 to 4 nucleotides, from 1 to 5 nucleotides, form 2 to 5 nucleotides, from 3 to 5 nucleotides, from 3 to 6 nucleotides, from 3 to 8 nucleotides, from 4 to 9 nucleotides, from 5 to 10 nucleotides, from 6 to 11 nucleotides, from 7 to 12 nucleotides, from 8 to 13 nucleotides, from 9 to 14 nucleotides, from 10 to 15 nucleotides, from 11 to 16 nucleotides, from 12 to 17 nucleotides, from 13 to 18 nucleotides, from 14 to 19 nucleotides, from 15 to 20 nucleotides in length. In some embodiments, a nucleotide insertion is a single nucleotide insertion. In some embodiments, a nucleotide insertion comprises insertion of two nucleotides.

[0234] The editing template of a PEgRNA may comprise one or more intended nucleotide edits, compared to the ATP7B gene to be edited. Position of the intended nucleotide edit(s) relevant to other components of the PEgRNA, or to particular nucleotides (e.g., mutations) in the ATP7B target gene may vary. In some embodiments, the nucleotide edit is in a region of the PEgRNA corresponding to or homologous to the protospacer sequence. In some embodiments, the nucleotide edit is in a region of the PEgRNA corresponding to a region of the ATP7B gene outside of the protospacer sequence.

[0235] In some embodiments, the position of a nucleotide edit incorporation in the target gene may be determined based on position of the protospacer adjacent motif (PAM). For instance, the intended nucleotide edit may be installed in a sequence corresponding to the protospacer adjacent motif (PAM) sequence. In some embodiments, a nucleotide edit in the editing template is at a position corresponding to the 5′ most nucleotide of the PAM sequence. In some embodiments, a nucleotide edit in the editing template is at a position corresponding to the 3′ most nucleotide of the PAM sequence. In some embodiments, position of an intended nucleotide edit in the editing template may be referred to by aligning the editing template with the partially complementary edit strand of the target gene, and referring to nucleotide positions on the editing strand where the intended nucleotide edit is incorporated. In some embodiments, a nucleotide edit is incorporated at a position corresponding to about 0, 1, 2, 3, 4, 5, 6, 7, 8, 9, 10, 11, 12, 13, 14, 15, 16, 17, 18, 19, 20, 21, 22, 23, 24, 25, 26, 27, 28, 29, 30, 31, 32, 33, 34, 35, 36, 37, 38, 39, or 40 nucleotides upstream of the 5′ most nucleotide of the PAM sequence in the edit strand of the target gene. By 0 base pair upstream or downstream of a reference position, it is meant that the intended nucleotide is immediately upstream or downstream of the reference position. In some embodiments, a nucleotide edit is incorporated at a position corresponding to about 0 to 2 nucleotides, 0 to 4 nucleotides, 0 to 6 nucleotides, 0 to 8 nucleotides, 0 to 10 nucleotides, 2 to 4 nucleotides, 2 to 6 nucleotides, 2 to 8 nucleotides, 2 to 10 nucleotides, 2 to 12 nucleotides, 4 to 6 nucleotides, 4 to 8 nucleotides, 4 to 10 nucleotides, 4 to 12 nucleotides, 4 to 14 nucleotides, 6 to 8 nucleotides, 6 to 10 nucleotides, 6 to 12 nucleotides, 6 to 14 nucleotides, 6 to 16 nucleotides, 8 to 10 nucleotides, 8 to 12 nucleotides, 8 to 14 nucleotides, 8 to 16 nucleotides, 8 to 18 nucleotides, 10 to 12 nucleotides, 10 to 14 nucleotides, 10 to 16 nucleotides, 10 to 18 nucleotides, 10 to 20 nucleotides, 12 to 14 nucleotides, 12 to 16 nucleotides, 12 to 18 nucleotides, 12 to 20 nucleotides, 12 to 22 nucleotides, 14 to 16 nucleotides, 14 to 18 nucleotides, 14 to 20 nucleotides, 14 to 22 nucleotides, 14 to 24 nucleotides, 16 to 18 nucleotides, 16 to 20 nucleotides, 16 to 22 nucleotides, 16 to 24 nucleotides, 16 to 26 nucleotides, 18 to 20 nucleotides, 18 to 22 nucleotides, 18 to 24 nucleotides, 18 to 26 nucleotides, 18 to 28 nucleotides, 20 to 22 nucleotides, 20 to 24 nucleotides, 20 to 26 nucleotides, 20 to 28 nucleotides, or 20 to 30 nucleotides upstream of the 5′ most nucleotide of the PAM sequence. In some embodiments, the nucleotide edit is incorporated at a position corresponding to 3 nucleotides upstream of the 5′ most nucleotide of the PAM sequence. In some embodiments, the nucleotide edit in is incorporated at a position corresponding to 4 nucleotides upstream of the 5′ most nucleotide of the PAM sequence. In some embodiments, the nucleotide edit is incorporated at a position corresponding to 5 nucleotides upstream of the 5′ most nucleotide of the PAM sequence. In some embodiments, the nucleotide edit in the editing template is at a position corresponding to 6 nucleotides upstream of the 5′ most nucleotide of the PAM sequence.

[0236] In some embodiments, an intended nucleotide edit is incorporated at a position corresponding to about 0, 1, 2, 3, 4, 5, 6, 7, 8, 9, 10, 11, 12, 13, 14, 15, 16, 17, 18, 19, 20, 21, 22, 23, 24, 25, 26, 27, 28, 29, 30, 31, 32, 33, 34, 35, 36, 37, 38, 39, or 40 nucleotides downstream of the 5′ most nucleotide of the PAM sequence in the edit strand of the target gene. In some embodiments, a nucleotide edit is incorporated at a position corresponding to about 0 to 2 nucleotides, 0 to 4 nucleotides, 0 to 6 nucleotides, 0 to 8 nucleotides, 0 to 10 nucleotides, 2 to 4 nucleotides, 2 to 6 nucleotides, 2 to 8 nucleotides, 2 to 10 nucleotides, 2 to 12 nucleotides, 4 to 6 nucleotides, 4 to 8 nucleotides, 4 to 10 nucleotides, 4 to 12 nucleotides, 4 to 14 nucleotides, 6 to 8 nucleotides, 6 to 10 nucleotides, 6 to 12 nucleotides, 6 to 14 nucleotides, 6 to 16 nucleotides, 8 to 10 nucleotides, 8 to 12 nucleotides, 8 to 14 nucleotides, 8 to 16 nucleotides, 8 to 18 nucleotides, 10 to 12 nucleotides, 10 to 14 nucleotides, 10 to 16 nucleotides, 10 to 18 nucleotides, 10 to 20 nucleotides, 12 to 14 nucleotides, 12 to 16 nucleotides, 12 to 18 nucleotides, 12 to 20 nucleotides, 12 to 22 nucleotides, 14 to 16 nucleotides, 14 to 18 nucleotides, 14 to 20 nucleotides, 14 to 22 nucleotides, 14 to 24 nucleotides, 16 to 18 nucleotides, 16 to 20 nucleotides, 16 to 22 nucleotides, 16 to 24 nucleotides, 16 to 26 nucleotides, 18 to 20 nucleotides, 18 to 22 nucleotides, 18 to 24 nucleotides, 18 to 26 nucleotides, 18 to 28 nucleotides, 20 to 22 nucleotides, 20 to 24 nucleotides, 20 to 26 nucleotides, 20 to 28 nucleotides, or 20 to 30 nucleotides downstream of the 5′ most nucleotide of the PAM sequence. In some embodiments, a nucleotide edit is incorporated at a position corresponding to 3 nucleotides downstream of the 5′ most nucleotide of the PAM sequence. In some embodiments, a nucleotide edit is incorporated at a position corresponding to 4 nucleotides downstream of the 5′ most nucleotide of the PAM sequence. In some embodiments, a nucleotide edit is incorporated at a position corresponding to 5 nucleotides downstream of the 5′ most nucleotide of the PAM sequence. In some embodiments, a nucleotide edit is incorporated at a position corresponding to 6 nucleotides downstream of the 5′ most nucleotide of the PAM sequence. By “upstream” and “downstream” it is intended to define relevant positions at least two regions or sequences in a nucleic acid molecule orientated in a 5′-to-3′ direction. For example, a first sequence is upstream of a second sequence in a DNA molecule where the first sequence is positioned 5′ to the second sequence. Accordingly, the second sequence is downstream of the first sequence.

[0237] In some embodiments, the position of a nucleotide edit incorporation in the target gene can be determined based on position of the nick site. In some embodiments, position of an intended nucleotide edit is 0, 1, 2, 3, 4, 5, 6, 7, 8, 9, 10, 11, 12, 13, 14, 15, 16, 17, 18, 19, 20, 21, 22, 23, 24, 25, 26, 27, 28, 29, 30, 31, 32, 33, 34, 35, 36, 37, 38, 39, 40, 45, 50, 55, 60, 65, 70, 75, 80, 85, 90, 95, 100, 110, 120, 130, 140, or 150 nucleotides apart from the nick site. In some embodiments, position of an intended nucleotide edit is 0, 1, 2, 3, 4, 5, 6, 7, 8, 9, 10, 11, 12, 13, 14, 15, 16, 17, 18, 19, 20, 21, 22, 23, 24, 25, 26, 27, 28, 29, 30, 31, 32, 33, 34, 35, 36, 37, 38, 39, 40, 45, 50, 55, 60, 65, 70, 75, 80, 85, 90, 95, 100, 110, 120, 130, 140, or 150 nucleotides downstream of the nick site on the PAM strand (or the non-target strand, or the edit strand) of the double stranded target DNA. In some embodiments, position of the intended nucleotide edit in the editing template can be referred to by aligning the editing template with the partially complementary editing target sequence on the edit strand and referring to nucleotide positions on the editing strand where the intended nucleotide edit is incorporated. Accordingly, in some embodiments, a nucleotide edit in an editing template is at a position corresponding to a position about 0, 1, 2,3, 4, 5, 6, 7, 8, 9, 10, 11, 12, 13, 14, 15, 16, 17, 18, 19, 20, 21, 22, 23, 24, 25, 26, 27, 28, 29, 30, 31, 32, 33, 34, 35, 36, 37, 38, 39, 40, 45, 50, 55, 60, 65, 70, 75, 80, 85, 90, 95, 100, 110, 120, 130, 140, or 150 nucleotides apart from the nick site. In some embodiments, a nucleotide edit in an editing template is at a position corresponding to a position about 0 to 2 nucleotides, 0 to 4 nucleotides, 0 to 6 nucleotides, 0 to 8 nucleotides, 0 to 10 nucleotides, 2 to 4 nucleotides, 2 to 6 nucleotides, 2 to 8 nucleotides, 2 to 10 nucleotides, 2 to 12 nucleotides, 4 to 6 nucleotides, 4 to 8 nucleotides, 4 to 10 nucleotides, 4 to 12 nucleotides, 4 to 14 nucleotides, 6 to 8 nucleotides, 6 to 10 nucleotides, 6 to 12 nucleotides, 6 to 14 nucleotides, 6 to 16 nucleotides, 8 to 10 nucleotides, 8 to 12 nucleotides, 8 to 14 nucleotides, 8 to 16 nucleotides, 8 to 18 nucleotides, 10 to 12 nucleotides, 10 to 14 nucleotides, 10 to 16 nucleotides, 10 to 18 nucleotides, 10 to 20 nucleotides, 12 to 14 nucleotides, 12 to 16 nucleotides, 12 to 18 nucleotides, 12 to 20 nucleotides, 12 to 22 nucleotides, 14 to 16 nucleotides, 14 to 18 nucleotides, 14 to 20 nucleotides, 14 to 22 nucleotides, 14 to 24 nucleotides, 16 to 18 nucleotides, 16 to 20 nucleotides, 16 to 22 nucleotides, 16 to 24 nucleotides, 16 to 26 nucleotides, 18 to 20 nucleotides, 18 to 22 nucleotides, 18 to 24 nucleotides, 18 to 26 nucleotides, 18 to 28 nucleotides, 20 to 22 nucleotides, 20 to 24 nucleotides, 20 to 26 nucleotides, 20 to 28 nucleotides, 20 to 30 nucleotides, 30 to 40 nucleotides, 40 to 50 nucleotides, 50 to 60 nucleotides, 60 to 70 nucleotides, 70 to 80 nucleotides, 80 to 90 nucleotides, 90 to 100 nucleotides, 100 to 110 nucleotides, 110 to 120 nucleotides, 120 to 130 nucleotides, 130 to 140 nucleotides, or 140 to 150 nucleotides apart from the nick site. In some embodiments, when referred to in the context of the PAM strand (or the non-target strand, or the edit strand), a nucleotide edit in an editing template is at a position corresponding to a position about 0 to 2 nucleotides, 0 to 4 nucleotides, 0 to 6 nucleotides, 0 to 8 nucleotides, 0 to 10 nucleotides, 2 to 4 nucleotides, 2 to 6 nucleotides, 2 to 8 nucleotides, 2 to 10 nucleotides, 2 to 12 nucleotides, 4 to 6 nucleotides, 4 to 8 nucleotides, 4 to 10 nucleotides, 4 to 12 nucleotides, 4 to 14 nucleotides, 6 to 8 nucleotides, 6 to 10 nucleotides, 6 to 12 nucleotides, 6 to 14 nucleotides, 6 tol6 nucleotides, 8 to 10 nucleotides, 8 to 12 nucleotides, 8 to 14 nucleotides, 8 to 16 nucleotides, 8 to 18 nucleotides, 10 to 12 nucleotides, 10 to 14 nucleotides, 10 to 16 nucleotides, 10 to 18 nucleotides, 10 to 20 nucleotides, 12 to 14 nucleotides, 12 to 16 nucleotides, 12 to 18 nucleotides, 12 to 20 nucleotides, 12 to 22 nucleotides, 14 to 16 nucleotides, 14 to 18 nucleotides, 14 to 20 nucleotides, 14 to 22 nucleotides, 14 to 24 nucleotides, 16 to 18 nucleotides, 16 to 20 nucleotides, 16 to 22 nucleotides, 16 to 24 nucleotides, 16 to 26 nucleotides, 18 to 20 nucleotides, 18 to 22 nucleotides, 18 to 24 nucleotides, 18 to 26 nucleotides, 18 to 28 nucleotides, 20 to 22 nucleotides, 20 to 24 nucleotides, 20 to 26 nucleotides, 20 to 28 nucleotides, 20 to 30 nucleotides, 30 to 40 nucleotides, 40 to 50 nucleotides, 50 to 60 nucleotides, 60 to 70 nucleotides, 70 to 80 nucleotides, 80 to 90 nucleotides, 90 to 100 nucleotides, 100 to 110 nucleotides, 110 to 120 nucleotides, 120 to 130 nucleotides, 130 to 140 nucleotides, or 140 to 150 nucleotides downstream from the nick site. The relative positions of the intended nucleotide edit(s) and nick site may be referred to by numbers. For example, in some embodiments, the nucleotide immediately downstream of the nick site on a PAM strand (or the non-target strand, or the edit strand) may be referred to as at position 0. The nucleotide immediately upstream of the nick site on the PAM strand (or the non-target strand, or the edit strand) may be referred to as at position −1. The nucleotides downstream of position 0 on the PAM strand can be referred to as at positions +1, +2, +3, +4, . . . +n, and the nucleotides upstream of position −1 on the PAM strand may be referred to as at positions −2, −3, −4, . . . , −n. Accordingly, in some embodiments, the nucleotide in the editing template that corresponds to position 0 when the editing template is aligned with the partially complementary editing target sequence by complementarity can also be referred to as position 0 in the editing template, the nucleotides in the editing template corresponding to the nucleotides at positions +1, +2, +3, +4, . . . , +n on the PAM strand of the double stranded target DNA can also be referred to as at positions +1, +2, +3, +4, . . . , +n in the editing template, and the nucleotides in the editing template corresponding to the nucleotides at positions −1, −2, −3, −4, . . . , −n on the PAM strand on the double stranded target DNA may also be referred to as at positions −1, −2, −3, −4, . . . , −n on the editing template, even though when the PEgRNA is viewed as a standalone nucleic acid, positions +1, +2, +3, +4, . . . , +n are 5′ of position 0 and positions −1, −2, −3, −4, . . . −n are 3′ of position 0 in the editing template. In some embodiments, an intended nucleotide edit is at position +n of the editing template relative to position 0. Accordingly, the intended nucleotide edit may be incorporated at position +n of the PAM strand of the double stranded target DNA (and subsequently, the target strand of the double stranded target DNA) by prime editing. The number n may be referred to as the nick to edit distance.

[0238] When referred to within the PEgRNA, positions of the one or more intended nucleotide edits may be referred to relevant to components of the PEgRNA. For example, an intended nucleotide edit may be 5′ or 3′ to the PBS. In some embodiments, a PEgRNA comprises the structure, from 5′ to 3′: a spacer, a gRNA core, an editing template, and a PBS. In some embodiments, the intended nucleotide edit is 0, 1, 2, 3, 4, 5, 6, 7, 8, 9, 10, 11, 12, 13, 14, 15, 16, 17, 18, 19, 20, 21, 22, 23, 24, 25, 26, 27, 28, 29, 30, 31, 32, 33, 34, 35, 36, 37, 38, 39, or 40 nucleotides upstream to the 5′ most nucleotide of the PBS. In some embodiments, the intended nucleotide edit is 0 to 2 nucleotides, 0 to 4 nucleotides, 0 to 6 nucleotides, 0 to 8 nucleotides, 0 to 10 nucleotides, 2 to 4 nucleotides, 2 to 6 nucleotides, 2 to 8 nucleotides, 2 to 10 nucleotides, 2 to 12 nucleotides, 4 to 6 nucleotides, 4 to 8 nucleotides, 4 to 10 nucleotides, 4 to 12 nucleotides, 4 to 14 nucleotides, 6 to 8 nucleotides, 6 to 10 nucleotides, 6 to 12 nucleotides, 6 to 14 nucleotides, 6 to 16 nucleotides, 8 to 10 nucleotides, 8 to 12 nucleotides, 8 to 14 nucleotides, 8 to 16 nucleotides, 8 to 18 nucleotides, 10 to 12 nucleotides, 10 to 14 nucleotides, 10 to 16 nucleotides, 10 to 18 nucleotides, 10 to 20 nucleotides, 12 to 14 nucleotides, 12 to 16 nucleotides, 12 to 18 nucleotides, 12 to 20 nucleotides, 12 to 22 nucleotides, 14 to 16 nucleotides, 14 to 18 nucleotides, 14 to 20 nucleotides, 14 to 22 nucleotides, 14 to 24 nucleotides, 16 to 18 nucleotides, 16 to 20 nucleotides, 16 to 22 nucleotides, 16 to 24 nucleotides, 16 to 26 nucleotides, 18 to 20 nucleotides, 18 to 22 nucleotides, 18 to 24 nucleotides, 18 to 26 nucleotides, 18 to 28 nucleotides, 20 to 22 nucleotides, 20 to 24 nucleotides, 20 to 26 nucleotides, 20 to 28 nucleotides, or 20 to 30 nucleotides upstream to the 5′ most nucleotide of the PBS.

[0239] The corresponding positions of the intended nucleotide edit incorporated in the target gene may also be referred to based on the nicking position (i.e., the nick site) generated by a prime editor based on sequence homology and complementarity. For example, in embodiments, the distance between the intended nucleotide edit to be incorporated into the target ATP7B gene and the nick site (also referred to as the “nick to edit distane”) may be determined by the position of the nick site and the position of the nucleotide(s) corresponding to the intended nucleotide edit(s), for example, by identifying sequence complementarity between the spacer and the search target sequence and sequence complementarity between the editing template and the editing target sequence. In certain embodiments, the position of the nucleotide edit can be in any position downstream of the nick site on the edit strand (or the PAM strand) generated by the prime editor, such that the distance between the nick site and the intended nucleotide edit is 0, 1, 2.3, 4, 5, 6, 7, 8, 9, 10, 11, 12, 13, 14, 15, 16, 17, 18, 19, 20, 21, 22, 23, 24, 25, 26, 27, 28, 29, or 30 nucleotides in length. In some embodiments, the position of the nucleotide edit is 0, 1, 2, 3, 4, 5, 6, 7, 8, 9, 10, 11, 12, 13, 14, 15, 16, 17, 18, 19, 20, 21, 22, 23, 24, 25, 26, 27, 28, 29, or 30 nucleotides upstream of the nick site on the edit strand. In some embodiments, the position of the nucleotide edit is 0, 1, 2, 3, 4, 5, 6, 7, 8, 9, 10, 11, 12, 13, 14, 15, 16, 17, 18, 19, 20, 21, 22, 23, 24, 25, 26, 27, 28, 29, or 30 nucleotides downstream of the nick site on the edit strand. In some embodiments, the position of the nucleotide edit is 0 base pair from the nick site on the edit strand, that is, the editing position is at the same position as the nick site. As used herein, the distance between the nick site and the nucleotide edit, for example, where the nucleotide edit comprises an insertion or deletion, refers to the 5′ most position of the nucleotide edit for a nick that creates a 3′ free end on the edit strand (i.e., the “near position” of the nucleotide edit to the nick site). Similarly, as used herein, the distance between the nick site and a PAM position edit, for example, where the nucleotide edit comprises an insertion, deletion, or substitution of two or more contiguous nucleotides, refers to the 5′ most position of the nucleotide edit and the 5′ most position of the PAM sequence.

[0240] In some embodiments, the editing template extends beyond a nucleotide edit to be incorporated to the target ATP7B gene sequence. For example, in some embodiments, the editing template comprises at least 1, 2, 3, 4, 5, 6, 7, 8, 9, 10, 11, 12, 13, 14, 15, 16, 17, 18, 19, 20, 21, 22, 23, 24, 25, 26, 27, 28, 29, 30, 31, 32, 33, 34, 35, 36, 37, 38, 39, 40, 41, 42, 43, 44, 45, 46, 47, 48, 49, 50, 51, 52, 53, 54, 55, 56, 57, 58, 59, 60, 61, 62, 63, 64, 65, 66, 67, 68, 69, 70, 71, 72, 73, 74, 75, 76, 77, 78, 79, or 80 nucleotides 3′ to the nucleotide edit to be incorporated to the target ATP7B gene sequence. In some embodiments, the editing template comprises 1 to 80 nucleotides 3′ to the nucleotide edit to be incorporated to the target ATP7B gene sequence.

[0241] In some embodiments, the editing template can comprise a second editing sequence comprising a second mutation relative to a target sequence. The second mutation can be designed to mutate or otherwise silence a PAM sequence such that a corresponding nucleic acid guided nuclease or CRISPR nuclease is no longer able to cleave the target sequence. In some embodiments, this mutation or silencing of a PAM can serve as a method for selecting transformants in which the first editing sequence has been incorporated. In some embodiments, the mutation is in at least 1, 2, 3, 4, 5, 6, 7, 8, 9, 10 or more nucleic acids in a PAM motif.

[0242] In some embodiments, the editing template comprises 1 to 2 nucleotides 3′ to the nucleotide edit to be incorporated to the target ATP7B gene sequence. In some embodiments, the editing template comprises 1 to 3 nucleotides 3′ to the nucleotide edit to be incorporated to the target ATP7B gene sequence. In some embodiments, the editing template comprises 1 to 4 nucleotides 3′ to the nucleotide edit to be incorporated to the target ATP7B gene sequence. In some embodiments, the editing template comprises 1 to 5 nucleotides 3′ to the nucleotide edit to be incorporated to the target ATP7B gene sequence. In some embodiments, the editing template comprises 1 to 6 nucleotides 3′ to the nucleotide edit to be incorporated to the target ATP7B gene sequence. In some embodiments, the editing template comprises 1 to 7 nucleotides 3′ to the nucleotide edit to be incorporated to the target ATP7B gene sequence. In some embodiments, the editing template comprises 1 to 8 nucleotides 3′ to the nucleotide edit to be incorporated to the target ATP7B gene sequence. In some embodiments, the editing template comprises 1 to 9 nucleotides 3′ to the nucleotide edit to be incorporated to the target ATP7B gene sequence. In some embodiments, the editing template comprises 1 to 10 nucleotides 3′ to the nucleotide edit to be incorporated to the target ATP7B gene sequence. In some embodiments, the editing template comprises 1 to 11 nucleotides 3′ to the nucleotide edit to be incorporated to the target ATP7B gene sequence. In some embodiments, the editing template comprises 1 to 12 nucleotides 3′ to the nucleotide edit to be incorporated to the target ATP7B gene sequence. In some embodiments, the editing template comprises 1 to 13 nucleotides 3′ to the nucleotide edit to be incorporated to the target ATP7B gene sequence. In some embodiments, the editing template comprises 1 to 14 nucleotides 3′ to the nucleotide edit to be incorporated to the target ATP7B gene sequence. In some embodiments, the editing template comprises 1 to 15 nucleotides 3′ to the nucleotide edit to be incorporated to the target ATP7B gene sequence. In some embodiments, the editing template comprises 1 to 16 nucleotides 3′ to the nucleotide edit to be incorporated to the target ATP7B gene sequence. In some embodiments, the editing template comprises 1 to 17 nucleotides 3′ to the nucleotide edit to be incorporated to the target ATP7B gene sequence. In some embodiments, the editing template comprises 1 to 18 nucleotides 3′ to the nucleotide edit to be incorporated to the target ATP7B gene sequence. In some embodiments, the editing template comprises 1 to 19 nucleotides 3′ to the nucleotide edit to be incorporated to the target ATP7B gene sequence. In some embodiments, the editing template comprises 1 to 20 nucleotides 3′ to the nucleotide edit to be incorporated to the target ATP7B gene sequence. In some embodiments, the editing template comprises 1 to 21 nucleotides 3′ to the nucleotide edit to be incorporated to the target ATP7B gene sequence. In some embodiments, the editing template comprises 1 to 22 nucleotides 3′ to the nucleotide edit to be incorporated to the target ATP7B gene sequence. In some embodiments, the editing template comprises 1 to 23 nucleotides 3′ to the nucleotide edit to be incorporated to the target ATP7B gene sequence. In some embodiments, the editing template comprises 1 to 24 nucleotides 3′ to the nucleotide edit to be incorporated to the target ATP7B gene sequence. In some embodiments, the editing template comprises 1 to 25 nucleotides 3′ to the nucleotide edit to be incorporated to the target ATP7B gene sequence. In some embodiments, the editing template comprises 1 to 26 nucleotides 3′ to the nucleotide edit to be incorporated to the target ATP7B gene sequence. In some embodiments, the editing template comprises 1 to 27 nucleotides 3′ to the nucleotide edit to be incorporated to the target ATP7B gene sequence. In some embodiments, the editing template comprises 1 to 28 nucleotides 3′ to the nucleotide edit to be incorporated to the target ATP7B gene sequence. In some embodiments, the editing template comprises 1 to 29 nucleotides 3′ to the nucleotide edit to be incorporated to the target ATP7B gene sequence. In some embodiments, the editing template comprises 1 to 30 nucleotides 3′ to the nucleotide edit to be incorporated to the target ATP7B gene sequence. In some embodiments, the editing template comprises 1 to 31 nucleotides 3′ to the nucleotide edit to be incorporated to the target ATP7B gene sequence. In some embodiments, the editing template comprises 1 to 32 nucleotides 3′ to the nucleotide edit to be incorporated to the target ATP7B gene sequence. In some embodiments, the editing template comprises 1 to 33 nucleotides 3′ to the nucleotide edit to be incorporated to the target ATP7B gene sequence. In some embodiments, the editing template comprises 1 to 34 nucleotides 3′ to the nucleotide edit to be incorporated to the target ATP7B gene sequence. In some embodiments, the editing template comprises 1 to 35 nucleotides 3′ to the nucleotide edit to be incorporated to the target ATP7B gene sequence. In some embodiments, the editing template comprises 1 to 36 nucleotides 3′ to the nucleotide edit to be incorporated to the target ATP7B gene sequence. In some embodiments, the editing template comprises 1 to 37 nucleotides 3′ to the nucleotide edit to be incorporated to the target ATP7B gene sequence. In some embodiments, the editing template comprises 1 to 38 nucleotides 3′ to the nucleotide edit to be incorporated to the target ATP7B gene sequence. In some embodiments, the editing template comprises 1 to 39 nucleotides 3′ to the nucleotide edit to be incorporated to the target ATP7B gene sequence. In some embodiments, the editing template comprises 1 to 40 nucleotides 3′ to the nucleotide edit to be incorporated to the target ATP7B gene sequence. In some embodiments, the editing template comprises 1 to 41 nucleotides 3′ to the nucleotide edit to be incorporated to the target ATP7B gene sequence. In some embodiments, the editing template comprises 1 to 42 nucleotides 3′ to the nucleotide edit to be incorporated to the target ATP7B gene sequence. In some embodiments, the editing template comprises 1 to 43 nucleotides 3′ to the nucleotide edit to be incorporated to the target ATP7B gene sequence. In some embodiments, the editing template comprises 1 to 44 nucleotides 3′ to the nucleotide edit to be incorporated to the target ATP7B gene sequence. In some embodiments, the editing template comprises 1 to 45 nucleotides 3′ to the nucleotide edit to be incorporated to the target ATP7B gene sequence. In some embodiments, the editing template comprises 1 to 46 nucleotides 3′ to the nucleotide edit to be incorporated to the target ATP7B gene sequence. In some embodiments, the editing template comprises 1 to 47 nucleotides 3′ to the nucleotide edit to be incorporated to the target ATP7B gene sequence. In some embodiments, the editing template comprises 1 to 48 nucleotides 3′ to the nucleotide edit to be incorporated to the target ATP7B gene sequence. In some embodiments, the editing template comprises 1 to 49 nucleotides 3′ to the nucleotide edit to be incorporated to the target ATP7B gene sequence. In some embodiments, the editing template comprises 1 to 50 nucleotides 3′ to the nucleotide edit to be incorporated to the target ATP7B gene sequence. In some embodiments, the editing template comprises 1 to 51 nucleotides 3′ to the nucleotide edit to be incorporated to the target ATP7B gene sequence. In some embodiments, the editing template comprises 1 to 52 nucleotides 3′ to the nucleotide edit to be incorporated to the target ATP7B gene sequence. In some embodiments, the editing template comprises 1 to 53 nucleotides 3′ to the nucleotide edit to be incorporated to the target ATP7B gene sequence. In some embodiments, the editing template comprises 1 to 54 nucleotides 3′ to the nucleotide edit to be incorporated to the target ATP7B gene sequence. In some embodiments, the editing template comprises 1 to 55 nucleotides 3′ to the nucleotide edit to be incorporated to the target ATP7B gene sequence. In some embodiments, the editing template comprises 1 to 56 nucleotides 3′ to the nucleotide edit to be incorporated to the target ATP7B gene sequence. In some embodiments, the editing template comprises 1 to 57 nucleotides 3′ to the nucleotide edit to be incorporated to the target ATP7B gene sequence. In some embodiments, the editing template comprises 1 to 58 nucleotides 3′ to the nucleotide edit to be incorporated to the target ATP7B gene sequence. In some embodiments, the editing template comprises 1 to 59 nucleotides 3′ to the nucleotide edit to be incorporated to the target ATP7B gene sequence. In some embodiments, the editing template comprises 1 to 60 nucleotides 3′ to the nucleotide edit to be incorporated to the target ATP7B gene sequence. In some embodiments, the editing template comprises 1 to 61 nucleotides 3′ to the nucleotide edit to be incorporated to the target ATP7B gene sequence. In some embodiments, the editing template comprises 1 to 62 nucleotides 3′ to the nucleotide edit to be incorporated to the target ATP7B gene sequence. In some embodiments, the editing template comprises 1 to 63 nucleotides 3′ to the nucleotide edit to be incorporated to the target ATP7B gene sequence. In some embodiments, the editing template comprises 1 to 64 nucleotides 3′ to the nucleotide edit to be incorporated to the target ATP7B gene sequence. In some embodiments, the editing template comprises 1 to 65 nucleotides 3′ to the nucleotide edit to be incorporated to the target ATP7B gene sequence. In some embodiments, the editing template comprises 1 to 66 nucleotides 3′ to the nucleotide edit to be incorporated to the target ATP7B gene sequence. In some embodiments, the editing template comprises 1 to 67 nucleotides 3′ to the nucleotide edit to be incorporated to the target ATP7B gene sequence. In some embodiments, the editing template comprises 1 to 68 nucleotides 3′ to the nucleotide edit to be incorporated to the target ATP7B gene sequence. In some embodiments, the editing template comprises 1 to 69 nucleotides 3′ to the nucleotide edit to be incorporated to the target ATP7B gene sequence. In some embodiments, the editing template comprises 1 to 70 nucleotides 3′ to the nucleotide edit to be incorporated to the target ATP7B gene sequence. In some embodiments, the editing template comprises 1 to 71 nucleotides 3′ to the nucleotide edit to be incorporated to the target ATP7B gene sequence. In some embodiments, the editing template comprises 1 to 72 nucleotides 3′ to the nucleotide edit to be incorporated to the target ATP7B gene sequence. In some embodiments, the editing template comprises 1 to 73 nucleotides 3′ to the nucleotide edit to be incorporated to the target ATP7B gene sequence. In some embodiments, the editing template comprises 1 to 74 nucleotides 3′ to the nucleotide edit to be incorporated to the target ATP7B gene sequence. In some embodiments, the editing template comprises 1 to 75 nucleotides 3′ to the nucleotide edit to be incorporated to the target ATP7B gene sequence. In some embodiments, the editing template comprises 1 to 76 nucleotides 3′ to the nucleotide edit to be incorporated to the target ATP7B gene sequence. In some embodiments, the editing template comprises 1 to 77 nucleotides 3′ to the nucleotide edit to be incorporated to the target ATP7B gene sequence. In some embodiments, the editing template comprises 1 to 78 nucleotides 3′ to the nucleotide edit to be incorporated to the target ATP7B gene sequence. In some embodiments, the editing template comprises 2 to 80 nucleotides 3′ to the nucleotide edit to be incorporated to the target ATP7B gene sequence. In some embodiments, the editing template comprises 3 to 80 nucleotides 3′ to the nucleotide edit to be incorporated to the target ATP7B gene sequence. In some embodiments, the editing template comprises 4 to 80 nucleotides 3′ to the nucleotide edit to be incorporated to the target ATP7B gene sequence. In some embodiments, the editing template comprises 5 to 80 nucleotides 3′ to the nucleotide edit to be incorporated to the target ATP7B gene sequence. In some embodiments, the editing template comprises 6 to 80 nucleotides 3′ to the nucleotide edit to be incorporated to the target ATP7B gene sequence. In some embodiments, the editing template comprises 7 to 80 nucleotides 3′ to the nucleotide edit to be incorporated to the target ATP7B gene sequence. In some embodiments, the editing template comprises 8 to 80 nucleotides 3′ to the nucleotide edit to be incorporated to the target ATP7B gene sequence. In some embodiments, the editing template comprises 9 to 80 nucleotides 3′ to the nucleotide edit to be incorporated to the target ATP7B gene sequence. In some embodiments, the editing template comprises 10 to 80 nucleotides 3′ to the nucleotide edit to be incorporated to the target ATP7B gene sequence. In some embodiments, the editing template comprises 11 to 80 nucleotides 3′ to the nucleotide edit to be incorporated to the target ATP7B gene sequence. In some embodiments, the editing template comprises 12 to 80 nucleotides 3′ to the nucleotide edit to be incorporated to the target ATP7B gene sequence. In some embodiments, the editing template comprises 13 to 80 nucleotides 3′ to the nucleotide edit to be incorporated to the target ATP7B gene sequence. In some embodiments, the editing template comprises 14 to 80 nucleotides 3′ to the nucleotide edit to be incorporated to the target ATP7B gene sequence. In some embodiments, the editing template comprises 15 to 80 nucleotides 3′ to the nucleotide edit to be incorporated to the target ATP7B gene sequence. In some embodiments, the editing template comprises 16 to 80 nucleotides 3′ to the nucleotide edit to be incorporated to the target ATP7B gene sequence. In some embodiments, the editing template comprises 17 to 80 nucleotides 3′ to the nucleotide edit to be incorporated to the target ATP7B gene sequence. In some embodiments, the editing template comprises 18 to 80 nucleotides 3′ to the nucleotide edit to be incorporated to the target ATP7B gene sequence. In some embodiments, the editing template comprises 19 to 80 nucleotides 3′ to the nucleotide edit to be incorporated to the target ATP7B gene sequence. In some embodiments, the editing template comprises 20 to 80 nucleotides 3′ to the nucleotide edit to be incorporated to the target ATP7B gene sequence. In some embodiments, the editing template comprises 21 to 80 nucleotides 3′ to the nucleotide edit to be incorporated to the target ATP7B gene sequence. In some embodiments, the editing template comprises 22 to 80 nucleotides 3′ to the nucleotide edit to be incorporated to the target ATP7B gene sequence. In some embodiments, the editing template comprises 23 to 80 nucleotides 3′ to the nucleotide edit to be incorporated to the target ATP7B gene sequence. In some embodiments, the editing template comprises 24 to 80 nucleotides 3′ to the nucleotide edit to be incorporated to the target ATP7B gene sequence. In some embodiments, the editing template comprises 25 to 80 nucleotides 3′ to the nucleotide edit to be incorporated to the target ATP7B gene sequence. In some embodiments, the editing template comprises 26 to 80 nucleotides 3′ to the nucleotide edit to be incorporated to the target ATP7B gene sequence. In some embodiments, the editing template comprises 27 to 80 nucleotides 3′ to the nucleotide edit to be incorporated to the target ATP7B gene sequence. In some embodiments, the editing template comprises 28 to 80 nucleotides 3′ to the nucleotide edit to be incorporated to the target ATP7B gene sequence. In some embodiments, the editing template comprises 29 to 80 nucleotides 3′ to the nucleotide edit to be incorporated to the target ATP7B gene sequence. In some embodiments, the editing template comprises 30 to 80 nucleotides 3′ to the nucleotide edit to be incorporated to the target ATP7B gene sequence. In some embodiments, the editing template comprises 31 to 80 nucleotides 3′ to the nucleotide edit to be incorporated to the target ATP7B gene sequence. In some embodiments, the editing template comprises 32 to 80 nucleotides 3′ to the nucleotide edit to be incorporated to the target ATP7B gene sequence. In some embodiments, the editing template comprises 33 to 80 nucleotides 3′ to the nucleotide edit to be incorporated to the target ATP7B gene sequence. In some embodiments, the editing template comprises 34 to 80 nucleotides 3′ to the nucleotide edit to be incorporated to the target ATP7B gene sequence. In some embodiments, the editing template comprises 35 to 80 nucleotides 3′ to the nucleotide edit to be incorporated to the target ATP7B gene sequence. In some embodiments, the editing template comprises 36 to 80 nucleotides 3′ to the nucleotide edit to be incorporated to the target ATP7B gene sequence. In some embodiments, the editing template comprises 37 to 80 nucleotides 3′ to the nucleotide edit to be incorporated to the target ATP7B gene sequence. In some embodiments, the editing template comprises 38 to 80 nucleotides 3′ to the nucleotide edit to be incorporated to the target ATP7B gene sequence. In some embodiments, the editing template comprises 39 to 80 nucleotides 3′ to the nucleotide edit to be incorporated to the target ATP7B gene sequence. In some embodiments, the editing template comprises 40 to 80 nucleotides 3′ to the nucleotide edit to be incorporated to the target ATP7B gene sequence. In some embodiments, the editing template comprises 41 to 80 nucleotides 3′ to the nucleotide edit to be incorporated to the target ATP7B gene sequence. In some embodiments, the editing template comprises 42 to 80 nucleotides 3′ to the nucleotide edit to be incorporated to the target ATP7B gene sequence. In some embodiments, the editing template comprises 43 to 80 nucleotides 3′ to the nucleotide edit to be incorporated to the target ATP7B gene sequence. In some embodiments, the editing template comprises 44 to 80 nucleotides 3′ to the nucleotide edit to be incorporated to the target ATP7B gene sequence. In some embodiments, the editing template comprises 45 to 80 nucleotides 3′ to the nucleotide edit to be incorporated to the target ATP7B gene sequence. In some embodiments, the editing template comprises 46 to 80 nucleotides 3′ to the nucleotide edit to be incorporated to the target ATP7B gene sequence. In some embodiments, the editing template comprises 47 to 80 nucleotides 3′ to the nucleotide edit to be incorporated to the target ATP7B gene sequence. In some embodiments, the editing template comprises 48 to 80 nucleotides 3′ to the nucleotide edit to be incorporated to the target ATP7B gene sequence. In some embodiments, the editing template comprises 49 to 80 nucleotides 3′ to the nucleotide edit to be incorporated to the target ATP7B gene sequence. In some embodiments, the editing template comprises 50 to 80 nucleotides 3′ to the nucleotide edit to be incorporated to the target ATP7B gene sequence. In some embodiments, the editing template comprises 51 to 80 nucleotides 3′ to the nucleotide edit to be incorporated to the target ATP7B gene sequence. In some embodiments, the editing template comprises 52 to 80 nucleotides 3′ to the nucleotide edit to be incorporated to the target ATP7B gene sequence. In some embodiments, the editing template comprises 53 to 80 nucleotides 3′ to the nucleotide edit to be incorporated to the target ATP7B gene sequence. In some embodiments, the editing template comprises 54 to 80 nucleotides 3′ to the nucleotide edit to be incorporated to the target ATP7B gene sequence. In some embodiments, the editing template comprises 55 to 80 nucleotides 3′ to the nucleotide edit to be incorporated to the target ATP7B gene sequence. In some embodiments, the editing template comprises 56 to 80 nucleotides 3′ to the nucleotide edit to be incorporated to the target ATP7B gene sequence. In some embodiments, the editing template comprises 57 to 80 nucleotides 3′ to the nucleotide edit to be incorporated to the target ATP7B gene sequence. In some embodiments, the editing template comprises 58 to 80 nucleotides 3′ to the nucleotide edit to be incorporated to the target ATP7B gene sequence. In some embodiments, the editing template comprises 59 to 80 nucleotides 3′ to the nucleotide edit to be incorporated to the target ATP7B gene sequence. In some embodiments, the editing template comprises 60 to 80 nucleotides 3′ to the nucleotide edit to be incorporated to the target ATP7B gene sequence. In some embodiments, the editing template comprises 61 to 80 nucleotides 3′ to the nucleotide edit to be incorporated to the target ATP7B gene sequence. In some embodiments, the editing template comprises 62 to 80 nucleotides 3′ to the nucleotide edit to be incorporated to the target ATP7B gene sequence. In some embodiments, the editing template comprises 63 to 80 nucleotides 3′ to the nucleotide edit to be incorporated to the target ATP7B gene sequence. In some embodiments, the editing template comprises 64 to 80 nucleotides 3′ to the nucleotide edit to be incorporated to the target ATP7B gene sequence. In some embodiments, the editing template comprises 65 to 80 nucleotides 3′ to the nucleotide edit to be incorporated to the target ATP7B gene sequence. In some embodiments, the editing template comprises 66 to 80 nucleotides 3′ to the nucleotide edit to be incorporated to the target ATP7B gene sequence. In some embodiments, the editing template comprises 67 to 80 nucleotides 3′ to the nucleotide edit to be incorporated to the target ATP7B gene sequence. In some embodiments, the editing template comprises 68 to 80 nucleotides 3′ to the nucleotide edit to be incorporated to the target ATP7B gene sequence. In some embodiments, the editing template comprises 69 to 80 nucleotides 3′ to the nucleotide edit to be incorporated to the target ATP7B gene sequence. In some embodiments, the editing template comprises 70 to 80 nucleotides 3′ to the nucleotide edit to be incorporated to the target ATP7B gene sequence. In some embodiments, the editing template comprises 71 to 80 nucleotides 3′ to the nucleotide edit to be incorporated to the target ATP7B gene sequence. In some embodiments, the editing template comprises 72 to 80 nucleotides 3′ to the nucleotide edit to be incorporated to the target ATP7B gene sequence. In some embodiments, the editing template comprises 73 to 80 nucleotides 3′ to the nucleotide edit to be incorporated to the target ATP7B gene sequence. In some embodiments, the editing template comprises 74 to 80 nucleotides 3′ to the nucleotide edit to be incorporated to the target ATP7B gene sequence. In some embodiments, the editing template comprises 75 to 80 nucleotides 3′ to the nucleotide edit to be incorporated to the target ATP7B gene sequence. In some embodiments, the editing template comprises 76 to 80 nucleotides 3′ to the nucleotide edit to be incorporated to the target ATP7B gene sequence. In some embodiments, the editing template comprises 77 to 80 nucleotides 3′ to the nucleotide edit to be incorporated to the target ATP7B gene sequence. In some embodiments, the editing template comprises 78 to 80 nucleotides 3′ to the nucleotide edit to be incorporated to the target ATP7B gene sequence. In some embodiments, the editing template comprises 79 to 80 nucleotides 3′ to the nucleotide edit to be incorporated to the target ATP7B gene sequence.

[0243] In some embodiments, the editing template comprises 2 to 40 nucleotides 3′ to the nucleotide edit to be incorporated to the target ATP7B gene sequence. In some embodiments, the editing template comprises 2 to 38 nucleotides 3′ to the nucleotide edit to be incorporated to the target ATP7B gene sequence. In some embodiments, the editing template comprises 2 to 36 nucleotides 3′ to the nucleotide edit to be incorporated to the target ATP7B gene sequence. In some embodiments, the editing template comprises 2 to 34 nucleotides 3′ to the nucleotide edit to be incorporated to the target ATP7B gene sequence. In some embodiments, the editing template comprises 2 to 32 nucleotides 3′ to the nucleotide edit to be incorporated to the target ATP7B gene sequence. In some embodiments, the editing template comprises 4 to 30 nucleotides 3′ to the nucleotide edit to be incorporated to the target ATP7B gene sequence. In some embodiments, the editing template comprises 2 to 25 nucleotides 3′ to the nucleotide edit to be incorporated to the target ATP7B gene sequence. In some embodiments, the editing template comprises 2 to 20 nucleotides 3′ to the nucleotide edit to be incorporated to the target ATP7B gene sequence. In some embodiments, the editing template comprises 2 to 15 nucleotides 3′ to the nucleotide edit to be incorporated to the target ATP7B gene sequence. In some embodiments, the editing template comprises 2 to 10 nucleotides 3′ to the nucleotide edit to be incorporated to the target ATP7B gene sequence. In some embodiments, the editing template comprises 2 to 5 nucleotides 3′ to the nucleotide edit to be incorporated to the target ATP7B gene sequence. In some embodiments, the editing template comprises 4 to 25 nucleotides 3′ to the nucleotide edit to be incorporated to the target ATP7B gene sequence. In some embodiments, the editing template comprises 4 to 20 nucleotides 3′ to the nucleotide edit to be incorporated to the target ATP7B gene sequence. In some embodiments, the editing template comprises 4 to 25 nucleotides 3′ to the nucleotide edit to be incorporated to the target ATP7B gene sequence. In some embodiments, the editing template comprises 4 to 15 nucleotides 3′ to the nucleotide edit to be incorporated to the target ATP7B gene sequence. In some embodiments, the editing template comprises 4 to 10 nucleotides 3′ to the nucleotide edit to be incorporated to the target ATP7B gene sequence. In some embodiments, the editing template comprises 10 to 15 nucleotides 3′ to the nucleotide edit to be incorporated to the target ATP7B gene sequence. In some embodiments, the editing template comprises 10 to 20 nucleotides 3′ to the nucleotide edit to be incorporated to the target ATP7B gene sequence. In some embodiments, the editing template comprises 10 to 30 nucleotides 3′ to the nucleotide edit to be incorporated to the target ATP7B gene sequence. In some embodiments, the editing template comprises 4 to 30 nucleotides 5′ to the nucleotide edit to be incorporated to the target ATP7B gene sequence. In some embodiments, the editing template comprises 4 to 25 nucleotides 5′ to the nucleotide edit to be incorporated to the target ATP7B gene sequence. In some embodiments, the editing template comprises 4 to 20 nucleotides 5′ to the nucleotide edit to be incorporated to the target ATP7B gene sequence.

[0244] In some embodiments, the length of the editing template is at least 2, 3, 4, 5, 6, 7, 8, 9, 10, 11, 12, 13, 14, 15, 16, 17, 18, 19, 20, 21, 22, 23, 24, 25, 26, 27, 28, 29, 30, 31, 32, 33, 34, 35, 36, 37, 38, 39, 40, 41, 42, 43, 44, 45, 46, 47, 48, 49, 50, 51, 52, 53, 54, 55, 56, 57, 58, 59, 60, 61, 62, 63, 64, 65, 66, 67, 68, 69, 70, 71, 72, 73, 74, 75, 76, 77, 78, 79, or 80 nucleotides longer than the nick to edit distance. In some embodiments, for example, the nick to edit distance is 8 nucleotides, and the editing template is 10 to 15, 10 to 20, 10 to 25, 10 to 30, 10 to 35, 10 to 40, 10 to 45, 10 to 50, 10 to 55, 10 to 60, 10 to 65, 10 to 70, 10 to 75, or 10 to 80 nucleotides in length. In some embodiments, the nick to edit distance is 22 nucleotides, and the editing template is 24 to 28, 24 to 30, 24 to 32, 24 to 34, 24 to 36, 24 to 37, 24 to 38, 24 to 40, 24 to 45, 24 to 50, 24 to 55, 24 to 60, 24 to 65, 24 to 70, 24 to 75, 24 to 80, 24 to 85, 24 to 90, 24 to 95, 24 to 100, 24 to 105, 24 to 100, 24 to 105, or 24 to 110 nucleotides in length.

[0245] In some embodiments, the editing template comprises an adenine at the first nucleobase position (e.g., for a PEgRNA following 5′-spacer-gRNA core-RTT-PBS-3′ orientation, the 5′ most nucleobase is the “first base”). In some embodiments, the editing template comprises a guanine at the first nucleobase position (e.g., for a PEgRNA following 5′-spacer-gRNA core-RTT-PBS-3′ orientation, the 5′ most nucleobase is the “first base”). In some embodiments, the editing template comprises an uracil at the first nucleobase position (e.g., for a PEgRNA following 5′-spacer-gRNA core-RTT-PBS-3′ orientation, the 5′ most nucleobase is the “first base”). In some embodiments, the editing template comprises a cytosine at the first nucleobase position (e.g., for a PEgRNA following 5′-spacer-gRNA core-RTT-PBS-3′ orientation, the 5′ most nucleobase is the “first base”). In some embodiments, the editing template does not comprise a cytosine at the first nucleobase position (e.g., for a PEgRNA following 5′-spacer-gRNA core-RTT-PBS-3′ orientation, the 5′ most nucleobase is the “first base”).

[0246] The editing template of a PEgRNA may encode a new single stranded DNA (e.g., by reverse transcription) to replace a editing target sequence in the target gene. In some embodiments, the editing target sequence in the edit strand of the target gene is replaced by the newly synthesized strand, and the nucleotide edit(s) are incorporated in the region of the target gene. In some embodiments, the target gene is an ATP7B gene. In some embodiments, the editing template of the PEgRNA encodes a newly synthesized single stranded DNA that comprises a wild type APT7B gene sequence. In some embodiments, the newly synthesized DNA strand replaces the editing target sequence in the target ATP7B gene, wherein the editing target sequence (or the endogenous sequence complementary to the editing target sequence on the target strand of the ATP7B gene) comprises a mutation compared to a wild type ATP7B gene. In some embodiments, the mutation is associated with Wilson's disease.

[0247] In some embodiments, the editing target sequence comprises a mutation in exon 1, exon 2, exon 3, exon 4, exon 5, exon 6, exon 7, exon 8, exon 9, exon 10, exon 11, exon 12, exon 13, exon 14, exon 15, exon 16, exon 17, exon 18, exon 19, exon 20, or exon 21 of the ATP7B gene as compared to a wild type ATP7B gene. In some embodiments, the editing target sequence comprises a mutation in exon 8, exon 13, exon 14, exon 15, or exon 17 of the ATP7B gene as compared to a wild type ATP7B gene. In some embodiments, the editing target sequence comprises a mutation in exon 14 of the ATP7B gene as compared to a wild type ATP7B gene. In some embodiments, the editing target sequence comprises a mutation in exon 3 of the ATP7B gene as compared to a wild type ATP7B gene. In some embodiments, the editing target sequence comprises a mutation that is located in exon 8 of the A7P7B gene as compared to a wild type ATP7B gene. In some embodiments, the mutation is not a c.1288dup duplication. In some embodiments, the editing target sequence comprises a mutation that is located between positions 51932669 and 52012130 of human chromosome 13 as set forth in human genome assembly consortium Human build 38 (GRCh38), GenBank accession GCA_000001405.15. In some embodiments, the editing target sequence comprises a mutation that is located between positions 51958233 and 51958433 of human chromosome 13 as set forth in human genome assembly consortium Human build 38 (GRCh38), GenBank accession GCA_000001405.15. In some embodiments, the editing target sequence comprises a mutation that encodes an amino acid substitution R778L relative to a wild type ATP7B polypeptide set forth in SEQ ID NO: 14897. In some embodiments, the editing target sequence comprises a G>T mutation at position 51958333 in human chromosome 13 as set forth in human genome assembly consortium Human build 38 (GRCh38), GenBank accession GCA_000001405.15. As used herein, unless otherwise noted, reference to positions in human genome is as set forth in human genome assembly consortium Human build 38 (GRCh38), GenBank accession GCA_000001405.15.

Wild Wild-type ATP7B protein sequence
>sp|P35670|ATP7B_HUMAN Copper-transporting
ATPase 2 OS = Homo sapiens OX = 9606 GN =
ATP7B PE = 1 SV = 4
(SEQ ID NO: 14897)
MPEQERQITAREGASRKILSKLSLPTRAWEPAMKKSFAFDNVGYEGGLDG
LGPSSQVATSTVRILGMTCQSCVKSIEDRISNLKGIISMKVSLEQGSATV
KYVPSVVCLQQVCHQIGDMGFEASIAEGKAASWPSRSLPAQEAVVKLRVE
GMTCQSCVSSIEGKVRKLQGVVRVKVSLSNQEAVITYQPYLIQPEDLRDH
VNDMGFEAAIKSKVAPLSLGPIDIERLQSTNPKRPLSSANQNFNNSETLG
HQGSHVVTLQLRIDGMHCKSCVLNIEENIGQLLGVQSIQVSLENKTAQVK
YDPSCTSPVALQRAIEALPPGNFKVSLPDGAEGSGTDHRSSSSHSPGSPP
RNQVQGTCSTTLIAIAGMTCASCVHSIEGMISQLEGVQQISVSLAEGTAT
VLYNPSVISPEELRAAIEDMGFEASVVSESCSTNPLGNHSAGNSMVQTTD
GTPTSVQEVAPHTGRLPANHAPDILAKSPQSTRAVAPQKCFLQIKGMTCA
SCVSNIERNLQKEAGVLSVLVALMAGKAEIKYDPEVIQPLEIAQFIQDLG
FEAAVMEDYAGSDGNIELTITGMTCASCVHNIESKLTRTNGITYASVALA
TSKALVKFDPEIIGPRDIIKIIEEIGFHASLAQRNPNAHHLDHKMEIKQW
KKSFLCSLVFGIPVMALMIYMLIPSNEPHQSMVLDHNIIPGLSILNLIFF
ILCTFVQLLGGWYFYVQAYKSLRHRSANMDVLIVLATSIAYVYSLVILVV
AVAEKAERSPVTFFDTPPMLFVFIALGRWLEHLAKSKTSEALAKLMSLQA
TEATVVTLGEDNLIIREEQVPMELVQRGDIVKVVPGGKFPVDGKVLEGNT
MADESLITGEAMPVTKKPGSTVIAGSINAHGSVLIKATHVGNDTTLAQIV
KLVEEAQMSKAPIQQLADRFSGYFVPFIIIMSTLTLVVWIVIGFIDFGVV
QRYFPNPNKHISQTEVIIRFAFQTSITVLCIACPCSLGLATPTAVMVGTG
VAAQNGILIKGGKPLEMAHKIKTVMFDKTGTITHGVPRVMRVLLLGDVAT
LPLRKVLAVVGTAEASSEHPLGVAVTKYCKEELGTETLGYCTDFQAVPGC
GIGCKVSNVEGILAHSERPLSAPASHLNEAGSLPAEKDAVPQTFSVLIGN
REWLRRNGLTISSDVSDAMTDHEMKGQTAILVAIDGVLCGMIAIADAVKQ
EAALAVHTLQSMGVDVVLITGDNRKTARAIATQVGINKVFAEVLPSHKVA
KVQELQNKGKKVAMVGDGVNDSPALAQADMGVAIGTGTDVAIEAADVVLI
RNDLLDVVASIHLSKRTVRRIRINLVLALIYNLVGIPIAAGVFMPIGIVL
QPWMGSAAMAASSVSVVLSSLQLKCYKKPDLERYEAQAHGHMKPLTASQV
SVHIGMDDRWRDSPRATPWDQVSYVSQVSLSSLTSDKPSRHSAAADDDGD
KWSLLLNGRDEEQYI

[0248] In some embodiments, the editing template comprises one or more intended nucleotide edits compared to the sequence on the target strand of the ATP7B gene that is complementary to the editing target sequence. In some embodiments, the editing template encodes a single stranded DNA that comprises one or more intended nucleotide edits compared to the editing target sequence. In some embodiments, the single stranded DNA replaces the editing target sequence by prime editing, thereby incorporating the one or more intended nucleotide edits.

[0249] In some embodiments, incorporation of the one or more intended nucleotide edits corrects the mutation in the editing target sequence to wild type nucleotides at corresponding positions in the ATP7B gene. As used herein, “correcting” a mutation means restoring a wild type sequence at the place of the mutation in the double stranded target DNA, e.g., target gene, by prime editing. In some embodiments, the editing template comprises and/or encodes a wild type ATP7B gene sequence.

[0250] In some embodiments, incorporation of the one or more intended nucleotide edits does not correct the mutation in the editing target sequence to wild type sequence, but allows for expression of a functional ATP7B protein encoded by the ATP7B gene.

[0251] In some embodiments, the editing template comprises one or more intended nucleotide edits compared to the sequence on the target strand of the ATP7B gene that is complementary to the editing target sequence, wherein the one or more intended nucleotide edits is a single nucleotide substitution, polynucleotide substitution, nucleotide insertion, or nucleotide deletion. In some embodiments, the intended nucleotide edit in the editing template comprises a single nucleotide substitution, polynucleotide substitution, nucleotide insertion, or nucleotide deletion compared to the sequence on the target strand of the ATP7B gene that is complementary to the editing target at a position corresponding to a mutation in ATP7B located between positions 51932669 and 52012130 of human chromosome 13, wherein the editing target sequence is on the sense strand of the ATP7B gene. In some embodiments, the intended nucleotide edit in the editing template comprises a single nucleotide substitution, polynucleotide substitution, nucleotide insertion, or nucleotide deletion compared to the sequence on the target strand of the ATP7B gene that is complementary to the editing target at a position corresponding to a mutation in ATP7B located between positions 51932669 and 52012130 of human chromosome 13, wherein the editing target sequence is on the antisense strand of the ATP7B gene. In some embodiments, the editing template (RTT) comprises an RTT as provided in Tables 1-Table 84.

[0252] A guide RNA core (also referred to herein as the gRNA core, gRNA scaffold, or gRNA backbone sequence) of a PEgRNA may contain a polynucleotide sequence that binds to a DNA binding domain (e.g., Cas9) of a prime editor. The gRNA core may interact with a prime editor as described herein, for example, by association with a DNA binding domain, such as a DNA nickase of the prime editor.

[0253] One of skill in the art will recognize that different prime editors having different DNA binding domains from different DNA binding proteins may require different gRNA core sequences specific to the DNA binding protein. In some embodiments, the gRNA core is capable of binding to a Cas9-based prime editor. In some embodiments, the gRNA core is capable of binding to a Cpf1-based prime editor. In some embodiments, the gRNA core is capable of binding to a Cas12b-based prime editor.

[0254] In some embodiments, the gRNA core comprises regions and secondary structures involved in binding with specific CRISPR Cas proteins. For example, in a Cas9 based prime editing system, the gRNA core of a PEgRNA may comprise one or more regions of a base paired “lower stem” adjacent to the spacer sequence and a base paired “upper stem” following the lower stem, where the lower stem and upper stem may be connected by a “bulge” comprising unpaired RNAs. The gRNA core may further comprise a “nexus” distal from the spacer sequence, followed by a hairpin structure. e.g., at the 3′ end, as exemplified in FIG. 4. In some embodiments, the gRNA core comprises modified nucleotides as compared to a wild type gRNA core in the lower stem, upper stem, and/or the hairpin. For example, nucleotides in the lower stem, upper stem, an/or the hairpin regions may be modified, deleted, or replaced. In some embodiments. RNA nucleotides in the lower stem, upper stem, an/or the hairpin regions may be replaced with one or more DNA sequences. In some embodiments, the gRNA core comprises unmodified or wild type RNA sequences in the nexus and/or the bulge regions. In some embodiments, the gRNA core does not include long stretches of A-T pairs, for example, a GUUUU-AAAAC pairing element. In some embodiments, a prime editing system comprises a prime editor and a PEgRNA, wherein the prime editor comprises a SpCas9 nickase or a variant thereof, and the gRNA core of the PEgRNA comprises the sequence: GUUUUAGAGCUAGAAAUAGCAAGUUAAAAUAAGGCUAGUCCGUUAUCAACUUGAAAAAG UGGCACCGAGUCGGUGC (SEQ ID NO: 14905). GUUUGAGAGCUAGAAAUAGCAAGUUUAAAUAAGGCUAGUCCGUUAUCAACUUGAAAAAG UGGGACCGAGUCGGUCC (SEQ ID NO: 14906), or GUUUAAGAGCUAUGCUGGAAACAGCAUAGCAAGUUUAAAUAAGGCUAGUCCGUUAUCAA CUUGAAAAAGUGGCACCGAGUCGGUGC (SEQ ID NO: 14907). In some embodiments, the gRNA core comprises the sequence GUUUUAGAGCUAGAAAUAGCAAGUUAAAAUAAGGCUAGUCCGUUAUCAACUUGAAAAAG UGGCACCGAGUCGGUGC (SEQ ID NO: 14905). Any gRNA core sequences known in the art are also contemplated in the prime editing compositions described herein.

[0255] A PEgRNA may also comprise optional modifiers, e.g., 3′ end modifier region and/or an 5′ end modifier region. In some embodiments, a PEgRNA comprises at least one nucleotide that is not part of a spacer, a gRNA core, or an extension arm. The optional sequence modifiers could be positioned within or between any of the other regions shown, and not limited to being located at the 3′ and 5′ ends. In certain embodiments, the PEgRNA comprises secondary RNA structure, such as, but not limited to, aptamers, hairpins, stem/loops, toeloops, and/or RNA-binding protein recruitment domains (e.g., the MS2 aptamer which recruits and binds to the MS2cp protein). In some embodiments, a PEgRNA comprises a short stretch of uracil at the 5′ end or the 3′ end. For example, in some embodiments, a PEgRNA comprising a 3′ extension arm comprises a “UUU” sequence at the 3′ end of the extension arm. In some embodiments, a PEgRNA comprises a toeloop sequence at the 3′ end. In some embodiments, the PEgRNA comprises a 3′ extension arm and a toeloop sequence at the 3′ end of the extension arm. In some embodiments, the PEgRNA comprises a 5′ extension arm and a toeloop sequence at the 5′ end of the extension arm. In some embodiments, the PEgRNA comprises a toeloop element having the sequence 5′-GAAANNNNN-3′, wherein N is any nucleobase. In some embodiments, the secondary RNA structure is positioned within the spacer. In some embodiments, the secondary structure is positioned within the extension arm. In some embodiments, the secondary structure is positioned within the gRNA core. In some embodiments, the secondary structure is positioned between the spacer and the gRNA core, between the gRNA core and the extension arm, or between the spacer and the extension arm. In some embodiments, the secondary structure is positioned between the PBS and the editing template. In some embodiments the secondary structure is positioned at the 3′ end or at the 5′ end of the PEgRNA. In some embodiments, the PEgRNA comprises a transcriptional termination signal at the 3′ end of the PEgRNA. In addition to secondary RNA structures, the PEgRNA may comprise a chemical linker or a poly(N) linker or tail, where “N” can be any nucleobase. In some embodiments, the chemical linker may function to prevent reverse transcription of the gRNA core.

[0256] In some embodiments, a PEgRNA or a nick guide RNA (ngRNA) can be chemically synthesized, or can be assembled or cloned and transcribed from a DNA sequence. e.g., a plasmid DNA sequence, or by any RNA oligonucleotide synthesis method known in the art. In some embodiments, DNA sequence that encodes a PEgRNA (or ngRNA) can be designed to append one or more nucleotides at the 5′ end or the 3′ end of the PEgRNA (or nick guide RNA) encoding sequence to enhance PEgRNA transcription. For example, in some embodiments, a DNA sequence that encodes a PEgRNA (or nick guide RNA) (or an ngRNA) can be designed to append a nucleotide G at the 5′ end. Accordingly, in some embodiments, the PEgRNA (or nick guide RNA) can comprise an appended nucleotide G at the 5′ end. In some embodiments, a DNA sequence that encodes a PEgRNA (or nick guide RNA) can be designed to append a sequence that enhances transcription. e.g., a Kozak sequence, at the 5′ end. In some embodiments, a DNA sequence that encodes a PEgRNA (or nick guide RNA) can be designed to append the sequence CACC or CCACC at the 5′ end. Accordingly, in some embodiments, the PEgRNA (or nick guide RNA) can comprise an appended sequence CACC or CCACC at the 5′ end. In some embodiments, a DNA sequence that encodes a PEgRNA (or nick guide RNA) can be designed to append the sequence TTT, TTTT, TTTTT, TTTTTT, TTTTTTT at the 3′ end. Accordingly, in some embodiments, the PEgRNA (or nick guide RNA) can comprise an appended sequence UUU, UUUU, UUUUU, UUUUUU, or UUUUUUU at the 3′ end. In some embodiments, a PEgRNA or ngRNA may include a modifying sequence at the 3′ end having the sequence AACAUUGACGCGUCUCUACGUGGGGGCGCG (SEQ ID NO: 14920).

[0257] In some embodiments, a prime editing system or composition further comprises a nick guide polynucleotide, such as a nick guide RNA (ngRNA). Without wishing to be bound by any particular theory, the non-edit strand of a double stranded target DNA in the target gene may be nicked by a CRISPR-Cas nickase directed by an ngRNA. In some embodiments, the nick on the non-edit strand directs endogenous DNA repair machinery to use the edit strand as a template for repair of the non-edit strand, which may increase efficiency of prime editing. In some embodiments, the non-edit strand is nicked by a prime editor localized to the non-edit strand by the ngRNA. Accordingly, also provided herein are PEgRNA systems comprising at least one PEgRNA and at least one ngRNA.

[0258] In some embodiments, the ngRNA is a guide RNA which contains a variable spacer sequence and a guide RNA scaffold or core region that interacts with the DNA binding domain, e.g., Cas9 of the prime editor. In some embodiments, the ngRNA comprises a spacer sequence (referred to herein as an ng spacer, or a second spacer) that is substantially complementary to a second search target sequence (or ng search target sequence), which is located on the edit strand, or the non-target strand. Thus, in some embodiments, the ng search target sequence recognized by the ng spacer and the search target sequence recognized by the spacer sequence of the PEgRNA are on opposite strands of the double stranded target DNA of target gene, e.g., the ATP7B gene. In some embodiments, a prime editing system or complex comprising a ngRNA may be referred to as a “PE3” prime editing system or PE3 prime editing complex. In some embodiments, an ng spacer sequence is complementary to, and may hybridize with the second search target sequence only after an intended nucleotide edit has been incorporated on the edit strand, by the editing template of a PEgRNA, e.g., a “PE3b” prime editing system or composition.

Lengthy table referenced here
US20240229038A1-20240711-T00001
Please refer to the end of the specification for access instructions.

Lengthy table referenced here
US20240229038A1-20240711-T00002
Please refer to the end of the specification for access instructions.

Lengthy table referenced here
US20240229038A1-20240711-T00003
Please refer to the end of the specification for access instructions.

Lengthy table referenced here
US20240229038A1-20240711-T00004
Please refer to the end of the specification for access instructions.

Lengthy table referenced here
US20240229038A1-20240711-T00005
Please refer to the end of the specification for access instructions.

Lengthy table referenced here
US20240229038A1-20240711-T00006
Please refer to the end of the specification for access instructions.

Lengthy table referenced here
US20240229038A1-20240711-T00007
Please refer to the end of the specification for access instructions.

Lengthy table referenced here
US20240229038A1-20240711-T00008
Please refer to the end of the specification for access instructions.

Lengthy table referenced here
US20240229038A1-20240711-T00009
Please refer to the end of the specification for access instructions.

Lengthy table referenced here
US20240229038A1-20240711-T00010
Please refer to the end of the specification for access instructions.

Lengthy table referenced here
US20240229038A1-20240711-T00011
Please refer to the end of the specification for access instructions.

Lengthy table referenced here
US20240229038A1-20240711-T00012
Please refer to the end of the specification for access instructions.

Lengthy table referenced here
US20240229038A1-20240711-T00013
Please refer to the end of the specification for access instructions.

Lengthy table referenced here
US20240229038A1-20240711-T00014
Please refer to the end of the specification for access instructions.

Lengthy table referenced here
US20240229038A1-20240711-T00015
Please refer to the end of the specification for access instructions.

Lengthy table referenced here
US20240229038A1-20240711-T00016
Please refer to the end of the specification for access instructions.

Lengthy table referenced here
US20240229038A1-20240711-T00017
Please refer to the end of the specification for access instructions.

Lengthy table referenced here
US20240229038A1-20240711-T00018
Please refer to the end of the specification for access instructions.

Lengthy table referenced here
US20240229038A1-20240711-T00019
Please refer to the end of the specification for access instructions.

Lengthy table referenced here
US20240229038A1-20240711-T00020
Please refer to the end of the specification for access instructions.

Lengthy table referenced here
US20240229038A1-20240711-T00021
Please refer to the end of the specification for access instructions.

Lengthy table referenced here
US20240229038A1-20240711-T00022
Please refer to the end of the specification for access instructions.

Lengthy table referenced here
US20240229038A1-20240711-T00023
Please refer to the end of the specification for access instructions.

Lengthy table referenced here
US20240229038A1-20240711-T00024
Please refer to the end of the specification for access instructions.

Lengthy table referenced here
US20240229038A1-20240711-T00025
Please refer to the end of the specification for access instructions.

Lengthy table referenced here
US20240229038A1-20240711-T00026
Please refer to the end of the specification for access instructions.

Lengthy table referenced here
US20240229038A1-20240711-T00027
Please refer to the end of the specification for access instructions.

Lengthy table referenced here
US20240229038A1-20240711-T00028
Please refer to the end of the specification for access instructions.

Lengthy table referenced here
US20240229038A1-20240711-T00029
Please refer to the end of the specification for access instructions.

Lengthy table referenced here
US20240229038A1-20240711-T00030
Please refer to the end of the specification for access instructions.

Lengthy table referenced here
US20240229038A1-20240711-T00031
Please refer to the end of the specification for access instructions.

Lengthy table referenced here
US20240229038A1-20240711-T00032
Please refer to the end of the specification for access instructions.

Lengthy table referenced here
US20240229038A1-20240711-T00033
Please refer to the end of the specification for access instructions.

Lengthy table referenced here
US20240229038A1-20240711-T00034
Please refer to the end of the specification for access instructions.

Lengthy table referenced here
US20240229038A1-20240711-T00035
Please refer to the end of the specification for access instructions.

Lengthy table referenced here
US20240229038A1-20240711-T00036
Please refer to the end of the specification for access instructions.

Lengthy table referenced here
US20240229038A1-20240711-T00037
Please refer to the end of the specification for access instructions.

Lengthy table referenced here
US20240229038A1-20240711-T00038
Please refer to the end of the specification for access instructions.

Lengthy table referenced here
US20240229038A1-20240711-T00039
Please refer to the end of the specification for access instructions.

Lengthy table referenced here
US20240229038A1-20240711-T00040
Please refer to the end of the specification for access instructions.

Lengthy table referenced here
US20240229038A1-20240711-T00041
Please refer to the end of the specification for access instructions.

Lengthy table referenced here
US20240229038A1-20240711-T00042
Please refer to the end of the specification for access instructions.

Lengthy table referenced here
US20240229038A1-20240711-T00043
Please refer to the end of the specification for access instructions.

Lengthy table referenced here
US20240229038A1-20240711-T00044
Please refer to the end of the specification for access instructions.

Lengthy table referenced here
US20240229038A1-20240711-T00045
Please refer to the end of the specification for access instructions.

Lengthy table referenced here
US20240229038A1-20240711-T00046
Please refer to the end of the specification for access instructions.

Lengthy table referenced here
US20240229038A1-20240711-T00047
Please refer to the end of the specification for access instructions.

Lengthy table referenced here
US20240229038A1-20240711-T00048
Please refer to the end of the specification for access instructions.

Lengthy table referenced here
US20240229038A1-20240711-T00049
Please refer to the end of the specification for access instructions.

Lengthy table referenced here
US20240229038A1-20240711-T00050
Please refer to the end of the specification for access instructions.

Lengthy table referenced here
US20240229038A1-20240711-T00051
Please refer to the end of the specification for access instructions.

Lengthy table referenced here
US20240229038A1-20240711-T00052
Please refer to the end of the specification for access instructions.

Lengthy table referenced here
US20240229038A1-20240711-T00053
Please refer to the end of the specification for access instructions.

Lengthy table referenced here
US20240229038A1-20240711-T00054
Please refer to the end of the specification for access instructions.

Lengthy table referenced here
US20240229038A1-20240711-T00055
Please refer to the end of the specification for access instructions.

Lengthy table referenced here
US20240229038A1-20240711-T00056
Please refer to the end of the specification for access instructions.

Lengthy table referenced here
US20240229038A1-20240711-T00057
Please refer to the end of the specification for access instructions.

Lengthy table referenced here
US20240229038A1-20240711-T00058
Please refer to the end of the specification for access instructions.

Lengthy table referenced here
US20240229038A1-20240711-T00059
Please refer to the end of the specification for access instructions.

Lengthy table referenced here
US20240229038A1-20240711-T00060
Please refer to the end of the specification for access instructions.

Lengthy table referenced here
US20240229038A1-20240711-T00061
Please refer to the end of the specification for access instructions.

Lengthy table referenced here
US20240229038A1-20240711-T00062
Please refer to the end of the specification for access instructions.

Lengthy table referenced here
US20240229038A1-20240711-T00063
Please refer to the end of the specification for access instructions.

Lengthy table referenced here
US20240229038A1-20240711-T00064
Please refer to the end of the specification for access instructions.

Lengthy table referenced here
US20240229038A1-20240711-T00065
Please refer to the end of the specification for access instructions.

Lengthy table referenced here
US20240229038A1-20240711-T00066
Please refer to the end of the specification for access instructions.

Lengthy table referenced here
US20240229038A1-20240711-T00067
Please refer to the end of the specification for access instructions.

Lengthy table referenced here
US20240229038A1-20240711-T00068
Please refer to the end of the specification for access instructions.

Lengthy table referenced here
US20240229038A1-20240711-T00069
Please refer to the end of the specification for access instructions.

Lengthy table referenced here
US20240229038A1-20240711-T00070
Please refer to the end of the specification for access instructions.

Lengthy table referenced here
US20240229038A1-20240711-T00071
Please refer to the end of the specification for access instructions.

Lengthy table referenced here
US20240229038A1-20240711-T00072
Please refer to the end of the specification for access instructions.

Lengthy table referenced here
US20240229038A1-20240711-T00073
Please refer to the end of the specification for access instructions.

Lengthy table referenced here
US20240229038A1-20240711-T00074
Please refer to the end of the specification for access instructions.

Lengthy table referenced here
US20240229038A1-20240711-T00075
Please refer to the end of the specification for access instructions.

Lengthy table referenced here
US20240229038A1-20240711-T00076
Please refer to the end of the specification for access instructions.

Lengthy table referenced here
US20240229038A1-20240711-T00077
Please refer to the end of the specification for access instructions.

Lengthy table referenced here
US20240229038A1-20240711-T00078
Please refer to the end of the specification for access instructions.

Lengthy table referenced here
US20240229038A1-20240711-T00079
Please refer to the end of the specification for access instructions.

Lengthy table referenced here
US20240229038A1-20240711-T00080
Please refer to the end of the specification for access instructions.

Lengthy table referenced here
US20240229038A1-20240711-T00081
Please refer to the end of the specification for access instructions.

Lengthy table referenced here
US20240229038A1-20240711-T00082
Please refer to the end of the specification for access instructions.

Lengthy table referenced here
US20240229038A1-20240711-T00083
Please refer to the end of the specification for access instructions.

Lengthy table referenced here
US20240229038A1-20240711-T00084
Please refer to the end of the specification for access instructions.

Lengthy table referenced here
US20240229038A1-20240711-T00085
Please refer to the end of the specification for access instructions.

[0259] In some embodiments, the ng search target sequence is located on the non-target strand, within 10 base pairs to 100 base pairs of an intended nucleotide edit incorporated by the PEgRNA on the edit strand. In some embodiments, the ng target search target sequence is within 10 bp, 20 bp, 30 bp, 40 bp, 50 bp, 60 bp, 70 bp, 80 bp, 90 bp, 91 bp, 92 bp, 93 bp, 94 bp, 95 bp, 96 bp, 97 bp, 98 bp, 99 bp, or 100 bp of an intended nucleotide edit incorporated by the PEgRNA on the edit strand. In some embodiments, the 5′ ends of the ng search target sequence and the PEgRNA search target sequence are within 1, 2, 3, 4, 5, 6, 7, 8, 9, or 10 bp apart from each other. In some embodiments, the 5′ ends of the ng search target sequence and the PEgRNA search target sequence are within 10 bp, 20 bp, 30 bp, 40 bp, 50 bp, 60 bp, 70 bp, 80 bp, 90 bp, 91 bp, 92 bp, 93 bp, 94 bp, 95 bp, 96 bp, 97 bp, 98 bp, 99 bp, or 100 bp apart from each other.

[0260] In some embodiments, an ng spacer sequence is complementary to, and may hybridize with the second search target sequence only after an intended nucleotide edit has been incorporated on the edit strand, by the editing template of a PEgRNA. Such a prime editing system may be referred to as a “PE3b” prime editing system or composition. In some embodiments, the ngRNA comprises a spacer sequence that matches only the edit strand after incorporation of the nucleotide edits, but not the endogenous target gene sequence on the edit strand. Accordingly, in some embodiments, an intended nucleotide edit is incorporated within the ng search target sequence. In some embodiments, the intended nucleotide edit is incorporated within about 1-10 nucleotides of the position corresponding to the PAM of the ng search target sequence. Exemplary combinations of PEgRNA components, e.g., spacer, PBS, and edit template/R717, as well as combinations of each PEgRNA and corresponding ngRNA(s) are provided in Tables 1-84. Tables 1-84 each contain three columns. The left column is the sequence number. The middle column provides the sequence of the component as actual sequence or by reference to a SEQ ID NO. Although all the sequences provided in Tables 1-84 are RNA sequences, “T” is used instead of a “U” in the sequences for consistency with the ST.26 standard used in the accompanying sequence listing. The right column contains a description of the sequence.

[0261] The PEgRNAs exemplified in Tables 1-84 comprise: (a) a spacer comprising at its 3′ end a sequence corresponding to a listed PEgRNA spacer sequence; (b) a gRNA core capable of complexing with a Cas9 protein, and (c) an extension arm comprising: (i) an editing template comprising at its 3′ end any RTT sequence from the same table as the PEgRNA spacer, and (ii) a prime binding site (PBS) comprising at its 5′ end any PBS sequence from the same table as the PEgRNA spacer. The PEgRNA spacer can be, for example, 16-22 nucleotides in length. The PEgRNA spacers in Tables 1-84 are annotated with their PAM sequence(s), enabling the selection of an appropriate Cas9 protein. The editing template can be referred to as a reverse transcription template (RTT). The editing template can encode wildtype ATP7B gene sequence. Alternatively, the editing template can encode one or more synonymous mutations relative to the wildtype ATP7B gene. The one or more synonymous mutations can be PAM silencing mutations. Editing templates/RTTs in Tables 1-84 that include PAM silencing mutations are annotated with a * followed by a number code. The explanation of the number code can be found in Table 85. The PBS can be, for example, 3 to 19 nucleotides in length. In some cases, a PBS length of no more than 3 nucleotides less than the PEgRNA spacer length is chosen.

[0262] The PEgRNA provided in Tables 1-84 can comprise, from 5′ to 3′, the spacer, the gRNA core, the edit template, and the PBS. The 3′ end of the edit template can be contiguous with the 5′ end of the PBS. The PEgRNA can comprise multiple RNA molecules (e.g., a crRNA containing the PEgRNA spacer and a tracrRNA containing the extension arm) or can be a single gRNA molecule. Any PEgRNA exemplified in Tables 1-84 may comprise, or further comprise, a 3′ motif at the 3′ end of the extension arm, for example, a hairpin-forming motif or a series of 1, 2, 3, 4, 5, 6, 7 or more U nucleotides. In some embodiments, the PEgRNA comprises 4 U nucleotides at its 3′ end. Without being bound by theory, such 3′ motifs are believed to increase PEgRNA stability. The PEgRNA may alternatively or additionally comprise one or more chemical modifications, such as phosphorothioate (PS) bond(s), 2′-O-methylated (2′-Ome) nucleotides, or a combination thereof. In some embodiments, the PEgRNA comprise 3′ mN*mN*mN*N and 5′mN*mN*mN* modifications, where m indicates that the nucleotide contains a 2′-O-Me modification and a * indicates the presence of a phosphorothioate bond. PEgRNA sequences exemplified in Tables 1-84 may alternatively be adapted for expression from a DNA template, for example, by including a 5′ terminal G if the spacer of the PEgRNA begins with another nucleotide, by including 6 or 7 U nucleotides at the 3′ end of the extension arm, or both. Such expression-adapted sequences may further comprise a hairpin-forming motif between the PBS and the 3′ terminal U series.

[0263] Any of the PEgRNAs of Tables 1-84 can be used in a Prime Editing system further comprising a nick guide RNA (ngRNA). Such ngRNA can comprise a spacer comprising at its 3′ end a sequence corresponding to nucleotides 5-20 of any ngRNA spacer listed in the same table as the PEgRNA spacer and a gRNA core capable of complexing with a Cas9 protein. For example, the sequence in the spacer of the ngRNA can comprise nucleotides 5-20, 4-20, 3-20, 2-20, or 1-20 of the listed spacer. In some embodiments, the spacer of the ngRNA is the complete sequence of an ngRNA spacer listed in the same table as the PEgRNA spacer. The ngRNA spacers in Tables 1-84 are annotated with their PAM sequences, enabling selection of an appropriate Cas9 protein. It can be advantageous to select an ngRNA spacer that has a PAM sequence compatible with the Cas9 protein used in the Prime Editor with the PEgRNA, thus avoiding the need to use two different Cas9 proteins. The ngRNA can comprise multiple RNA molecules (e.g., a crRNA containing the ngRNA spacer and a tracrRNA) or can be a single gRNA molecule. The ngRNA is capable of directing a complexed Cas9 protein to bind the edit strand of the ATP7B gene; thus, a complexed Cas9 nickase containing a nuclease inactivating mutation in the HNH domain will nick the non-edit strand. A PE3 ngRNA spacer has perfect complementarity to the edit strand both pre- and post-edit; a PE3b ngRNA spacer has perfect complementarity to the edit strand post-edit; and a PE3* spacer has perfect complementarity to the edit strand post-edit with a PEgRNA containing an edit template encoding a PAM silencing mutation. Because some PAMs can be silenced by more than 1 synonymous mutation, edit templates (RTTs) encoding a PAM silencing mutation and ngRNA spacers having 100% complementary with the portion of the edit strand containing the encoded PAM silencing mutation are coded with a number following the asterisk (*). The particular PAM silencing synonymous mutation corresponding to a given number code can be found in Table 85.

[0264] Any ngRNA sequence provided in Tables 1-84 may comprise, or further comprise, a 3′ motif at their 3′ end, for example, a series of 1, 2, 3, 4, 5, 6, 7 or more U nucleotides. In some embodiments, the ngRNA comprises 4 U nucleotides at its 3′ end. Without being bound by theory, such 3′ motifs are believed to increase ngRNA stability. The ngRNA may alternatively or additionally comprise one or more chemical modifications, such as phosphorothioate (PS) bond(s), 2′-O-methylated (2′-Ome) nucleotides, or a combination thereof. In some embodiments, the ngRNA comprise 3′ mN*mN*mN*N and 5′mN*mN*mN* modifications, where m indicates that the nucleotide contains a 2′-O-Me modification and a * indicates the presence of a phosphorothioate bond. NgRNA sequences may alternatively be adapted for expression from a DNA template, for example, by including a 5′ terminal G if the spacer of the ngRNA begins with another nucleotide, by including 6 or 7 U nucleotides at the 3′ end of the ngRNA, or both.

[0265] In some embodiments, the gRNA core for the PEgRNA and/or the ngRNA comprises a sequence selected from SEQ ID Nos 14894-14896.

[0266] Table 1 provides Prime Editing guide RNAs (PEgRNAs) that can be used with any Prime Editor containing a Cas9 protein capable of recognizing a TG or TGG PAM sequence. The PEgRNAs of Table 1 can also be used in Prime Editing systems further comprising a nick guide RNA (ngRNA). Such PEgRNAs and Prime Editing systems can be used, for example, to correct an R778L mutation in ATP7B.

[0267] The PEgRNAs exemplified in Table 1 comprise: (a) a spacer comprising at its 3′ end a sequence corresponding to sequence number 1; (b) a gRNA core capable of complexing with a Cas9 protein, and (c) an extension arm comprising: (i) an editing template at least 94 nucleotides in length and comprising at its 3′ end a sequence corresponding to sequence number 25-29, and (ii) a prime binding site (PBS) comprising at its 5′ end a sequence corresponding to sequence number 8. The PEgRNA spacer can be, for example, 16-22 nucleotides in length and can comprise the sequence corresponding to sequence number 1-7. In some embodiments, the PEgRNA spacer comprises sequence number 5. The PEgRNA spacers in Table 1 are annotated with their PAM sequence(s), enabling the selection of an appropriate Cas9 protein. The editing template can be referred to as a reverse transcription template (RTT). The editing template can encode wildtype ATP7B gene sequence. For example, the editing template can comprise at its 3′ end the sequence corresponding to sequence number 25, 33, 36, 42, 49, 53, or 55. Alternatively, the editing template can encode one or more synonymous mutations relative to the wildtype ATP7B gene. The editing template can encode one or more synonymous mutations that are PAM silencing mutations and can comprise at its 3′ end the sequence corresponding to sequence number 26, 27, 28, 29, 30, 31, 32, 34, 35, 37, 38, 39, 40, 41, 43, 44, 45, 46, 47, 48, 50, 51, 52, 54, 56, 57, 58, or 59. The PBS can be, for example, 3 to 19 nucleotides in length and can comprise the sequence corresponding to sequence number 8-24. In some cases, a PBS length of no more than 3 nucleotides less than the PEgRNA spacer length is chosen.

[0268] Any of the PEgRNAs of Table 1 can be used in a Prime Editing system further comprising a nick guide RNA (ngRNA). Such ngRNA can comprise a spacer comprising at its 3′ end a sequence corresponding to nucleotides 5-20 of any ngRNA spacer listed in Table 1 and a gRNA core capable of complexing with a Cas9 protein. For example, the sequence in the spacer of the ngRNA can comprise nucleotides 5-20, 4-20, 3-20, 2-20, or 1-20 of sequence number 60-99. In some embodiments, the spacer of the ngRNA is a ngRNA spacer listed in Table 1. The ngRNA spacers in Table 1 are annotated with their PAM sequences, enabling selection of an appropriate Cas9 protein. It can be advantageous to select a ngRNA spacer that has a PAM sequence compatible with the Cas9 protein used in the Prime Editor, thus avoiding the need to use two different Cas9 proteins. The ngRNA is capable of directing a complexed Cas9 protein to bind the edit strand of the ATP7B gene; thus, a complexed Cas9 nickase containing a nuclease inactivating mutation in the HNH domain will nick the non-edit strand. A PE3 ngRNA spacer has perfect complementarity to the edit strand both pre- and post-edit; a PE3b ngRNA spacer has perfect complementarity to the edit strand post-edit; and a PE3* spacer has perfect complementarity to the edit strand post-edit with a PEgRNA containing an edit template encoding a PAM silencing mutation. Because some PAMs can be silenced by more than 1 synonymous mutation, edit templates (RTTs) encoding a PAM silencing mutation and ngRNA spacers having 100% complementary with the portion of the edit strand containing the encoded PAM silencing mutation are coded with a number following the asterisk (*). Exemplary ngRNA provided in Table 1 can comprise a sequence corresponding to sequence number 100-118.

[0269] Table 2 provides Prime Editing guide RNAs (PEgRNAs) that can be used with any Prime Editor containing a Cas9 protein capable of recognizing a TG or TGG PAM sequence. The PEgRNAs of Table 2 can also be used in Prime Editing systems further comprising a nick guide RNA (ngRNA). Such PEgRNAs and Prime Editing systems can be used, for example, to correct an R778L mutation in ATP7B.

[0270] The PEgRNAs exemplified in Table 2 comprise: (a) a spacer comprising at its 3′ end a sequence corresponding to sequence number 119; (b) a gRNA core capable of complexing with a Cas9 protein, and (c) an extension arm comprising: (i) an editing template at least 91 nucleotides in length and comprising at its 3′ end a sequence corresponding to sequence number 143-146, and (ii) a prime binding site (PBS) comprising at its 5′ end a sequence corresponding to sequence number 126. The PEgRNA spacer can be, for example, 16-22 nucleotides in length and can comprise the sequence corresponding to sequence number 119-125. In some embodiments, the PEgRNA spacer comprises sequence number 123. The PEgRNA spacers in Table 2 are annotated with their PAM sequence(s), enabling the selection of an appropriate Cas9 protein. The editing template can be referred to as a reverse transcription template (RTT). The editing template can encode wildtype ATP7B gene sequence. For example, the editing template can comprise at its 3′ end the sequence corresponding to sequence number 145, 149, 152, 155, 161, 166, 170, 172, 176, or 182. Alternatively, the editing template can encode one or more synonymous mutations relative to the wildtype ATP7B gene. The editing template can encode one or more synonymous mutations that are PAM silencing mutations and can comprise at its 3′ end the sequence corresponding to sequence number 143, 144, 146, 147, 148, 150, 151, 153, 154, 156, 157, 158, 159, 160, 162, 163, 164, 165, 167, 168, 169, 171, 173, 174, 175, 177, 178, 179, 180, or 181. The PBS can be, for example, 3 to 19 nucleotides in length and can comprise the sequence corresponding to sequence number 126-142. In some cases, a PBS length of no more than 3 nucleotides less than the PEgRNA spacer length is chosen.

[0271] Any of the PEgRNAs of Table 2 can be used in a Prime Editing system further comprising a nick guide RNA (ngRNA). Such ngRNA can comprise a spacer comprising at its 3′ end a sequence corresponding to nucleotides 5-20 of any ngRNA spacer listed in Table 2 and a gRNA core capable of complexing with a Cas9 protein. For example, the sequence in the spacer of the ngRNA can comprise nucleotides 5-20, 4-20, 3-20, 2-20, or 1-20 of sequence number 60, 61, 62, 63, 64, 65, 67, 68, 69, 70, 71, 72, 75, 76, 77, 78, 79, 81, 84, 85, 88, 90, 91, 92, 93, 95, 96, 97, 98, 99, 183, 184, 185, 186, 187, 188, 189, 190, 191, or 192. In some embodiments, the spacer of the ngRNA is a ngRNA spacer listed in Table 2. The ngRNA spacers in Table 2 are annotated with their PAM sequences, enabling selection of an appropriate Cas9 protein. It can be advantageous to select a ngRNA spacer that has a PAM sequence compatible with the Cas9 protein used in the Prime Editor, thus avoiding the need to use two different Cas9 proteins. The ngRNA is capable of directing a complexed Cas9 protein to bind the edit strand of the ATP7B gene; thus, a complexed Cas9 nickase containing a nuclease inactivating mutation in the HNH domain will nick the non-edit strand. A PE3 ngRNA spacer has perfect complementarity to the edit strand both pre- and post-edit; a PE3b ngRNA spacer has perfect complementarity to the edit strand post-edit; and a PE3* spacer has perfect complementarity to the edit strand post-edit with a PEgRNA containing an edit template encoding a PAM silencing mutation. Because some PAMs can be silenced by more than 1 synonymous mutation, edit templates (RTTs) encoding a PAM silencing mutation and ngRNA spacers having 100% complementary with the portion of the edit strand containing the encoded PAM silencing mutation are coded with a number following the asterisk (*). Exemplary ngRNA provided in Table 2 can comprise a sequence corresponding to any one of sequence numbers 100-118.

[0272] Table 3 provides Prime Editing guide RNAs (PEgRNAs) that can be used with any Prime Editor containing a Cas9 protein capable of recognizing a TG or TGG PAM sequence. The PEgRNAs of Table 3 can also be used in Prime Editing systems further comprising a nick guide RNA (ngRNA). Such PEgRNAs and Prime Editing systems can be used, for example, to correct an R778L mutation in ATP7B.

[0273] The PEgRNAs exemplified in Table 3 comprise: (a) a spacer comprising at its 3′ end a sequence corresponding to sequence number 193; (b) a gRNA core capable of complexing with a Cas9 protein, and (c) an extension arm comprising: (i) an editing template at least 82 nucleotides in length and comprising at its 3′ end a sequence corresponding to any one of sequence numbers 217-220, and (ii) a prime binding site (PBS) comprising at its 5′ end a sequence corresponding to sequence number 200. The PEgRNA spacer can be, for example, 16-22 nucleotides in length and can comprise the sequence corresponding to any one of sequence numbers 193-199. In some embodiments, the PEgRNA spacer comprises sequence number 197. The PEgRNA spacers in Table 3 are annotated with their PAM sequence(s), enabling the selection of an appropriate Cas9 protein. The editing template can be referred to as a reverse transcription template (RTT). The editing template can encode wildtype ATP7B gene sequence. For example, the editing template can comprise at its 3′ end the sequence corresponding to sequence number 220, 222, 228, 232, 236, 240, 241, 247, 251, 253, 257, 262, 268, 269, 276, 280, 284, 287, or 289. Alternatively, the editing template can encode one or more synonymous mutations relative to the wildtype ATP7B gene. The editing template can encode one or more synonymous mutations that are PAM silencing mutations and can comprise at its 3′ end the sequence corresponding to sequence number 217, 218, 219, 221, 223, 224, 225, 226, 227, 229, 230, 231, 233, 234, 235, 237, 238, 239, 242, 243, 244, 245, 246, 248, 249, 250, 252, 254, 255, 256, 258, 259, 260, 261, 263, 264, 265, 266, 267, 270, 271, 272, 273, 274, 275, 277, 278, 279, 281, 282, 283, 285, 286, 288, 290, 291, or 292. The PBS can be, for example, 3 to 19 nucleotides in length and can comprise the sequence corresponding to any one of sequence numbers 200-216. In some cases, a PBS length of no more than 3 nucleotides less than the PEgRNA spacer length is chosen.

[0274] Any of the PEgRNAs of Table 3 can be used in a Prime Editing system further comprising a nick guide RNA (ngRNA). Such ngRNA can comprise a spacer comprising at its 3′ end a sequence corresponding to nucleotides 5-20 of any ngRNA spacer listed in Table 3 and a gRNA core capable of complexing with a Cas9 protein. For example, the sequence in the spacer of the ngRNA can comprise nucleotides 5-20, 4-20, 3-20, 2-20, or 1-20 of sequence number 60, 61, 62, 63, 64, 65, 68, 69, 70, 72, 76, 77, 78, 79, 81, 84, 85, 88, 90, 91, 92, 93, 95, 96, 97, 98, 99, 189, 293, 294, 295, 296, or 297. In some embodiments, the spacer of the ngRNA is a ngRNA spacer listed in Table 3. The ngRNA spacers in Table 3 are annotated with their PAM sequences, enabling selection of an appropriate Cas9 protein. It can be advantageous to select a ngRNA spacer that has a PAM sequence compatible with the Cas9 protein used in the Prime Editor, thus avoiding the need to use two different Cas9 proteins. The ngRNA is capable of directing a complexed Cas9 protein to bind the edit strand of the ATP7B gene; thus, a complexed Cas9 nickase containing a nuclease inactivating mutation in the HNH domain will nick the non-edit strand. A PE3 ngRNA spacer has perfect complementarity to the edit strand both pre- and post-edit; a PE3b ngRNA spacer has perfect complementarity to the edit strand post-edit; and a PE3* spacer has perfect complementarity to the edit strand post-edit with a PEgRNA containing an edit template encoding a PAM silencing mutation. Because some PAMs can be silenced by more than 1 synonymous mutation, edit templates (RTTs) encoding a PAM silencing mutation and ngRNA spacers having 100% complementary with the portion of the edit strand containing the encoded PAM silencing mutation are coded with a number following the asterisk (*). Exemplary ngRNA provided in Table 3 can comprise a sequence corresponding to sequence number 100, 101, 102, 103, 104, 105, 107, 108, 109, 110, 112, 113, 114, 115, 116, 117, or 118.

[0275] Table 4 provides Prime Editing guide RNAs (PEgRNAs) that can be used with any Prime Editor containing a Cas9 protein capable of recognizing a AG or AGG PAM sequence. The PEgRNAs of Table 4 can also be used in Prime Editing systems further comprising a nick guide RNA (ngRNA). Such PEgRNAs and Prime Editing systems can be used, for example, to correct an R778L mutation in ATP7B.

[0276] The PEgRNAs exemplified in Table 4 comprise: (a) a spacer comprising at its 3′ end a sequence corresponding to sequence number 298; (b) a gRNA core capable of complexing with a Cas9 protein, and (c) an extension arm comprising: (i) an editing template at least 73 nucleotides in length and comprising at its 3′ end a sequence corresponding to any one of sequence numbers 322-323, and (ii) a prime binding site (PBS) comprising at its 5′ end a sequence corresponding to sequence number 305. The PEgRNA spacer can be, for example, 16-22 nucleotides in length and can comprise the sequence corresponding to any one of sequence numbers 298-304. In some embodiments, the PEgRNA spacer comprises sequence number 302. The PEgRNA spacers in Table 4 are annotated with their PAM sequence(s), enabling the selection of an appropriate Cas9 protein. The editing template can be referred to as a reverse transcription template (RTT). The editing template can encode wildtype ATP7B gene sequence. For example, the editing template can comprise at its 3′ end the sequence corresponding to sequence number 322, 324, 326, 329, 330, 333, 334, 337, 338, 340, 342, 344, 347, 349, 350, 352, 355, 356, 359, 361, 363, 364, 366, 368, 370, 373, 374, or 377. Alternatively, the editing template can encode one or more synonymous mutations relative to the wildtype ATP7B gene. The editing template can encode one or more synonymous mutations that are PAM silencing mutations and can comprise at its 3′ end the sequence corresponding to sequence number 323, 325, 327, 328, 331, 332, 335, 336, 339, 341, 343, 345, 346, 348, 351, 353, 354, 357, 358, 360, 362, 365, 367, 369, 371, 372, 375, or 376. The PBS can be, for example, 3 to 19 nucleotides in length and can comprise the sequence corresponding to any one of sequence numbers 305-321. In some cases, a PBS length of no more than 3 nucleotides less than the PEgRNA spacer length is chosen.

[0277] Any of the PEgRNAs of Table 4 can be used in a Prime Editing system further comprising a nick guide RNA (ngRNA). Such ngRNA can comprise a spacer comprising at its 3′ end a sequence corresponding to nucleotides 5-20 of any ngRNA spacer listed in Table 4 and a gRNA core capable of complexing with a Cas9 protein. For example, the sequence in the spacer of the ngRNA can comprise nucleotides 5-20, 4-20, 3-20, 2-20, or 1-20 of sequence number 60, 61, 62, 63, 64, 65, 68, 70, 72, 76, 77, 78, 79, 81, 84, 85, 88, 90, 91, 92, 93, 95, 96, 97, 98, 99, 189, 293, 294, 378, or 379. In some embodiments, the spacer of the ngRNA is a ngRNA spacer listed in Table 4. The ngRNA spacers in Table 4 are annotated with their PAM sequences, enabling selection of an appropriate Cas9 protein. It can be advantageous to select a ngRNA spacer that has a PAM sequence compatible with the Cas9 protein used in the Prime Editor, thus avoiding the need to use two different Cas9 proteins. The ngRNA is capable of directing a complexed Cas9 protein to bind the edit strand of the ATP7B gene; thus, a complexed Cas9 nickase containing a nuclease inactivating mutation in the HNH domain will nick the non-edit strand. A PE3 ngRNA spacer has perfect complementarity to the edit strand both pre- and post-edit; a PE3b ngRNA spacer has perfect complementarity to the edit strand post-edit; and a PE3* spacer has perfect complementarity to the edit strand post-edit with a PEgRNA containing an edit template encoding a PAM silencing mutation. Because some PAMs can be silenced by more than 1 synonymous mutation, edit templates (RTTs) encoding a PAM silencing mutation and ngRNA spacers having 100% complementary with the portion of the edit strand containing the encoded PAM silencing mutation are coded with a number following the asterisk (*). Exemplary ngRNA provided in Table 4 can comprise a sequence corresponding to sequence number 100, 101, 102, 103, 104, 105, 107, 108, 109, 110, 112, 113, 114, 115, 116, 117, or 118.

[0278] Table 5 provides Prime Editing guide RNAs (PEgRNAs) that can be used with any Prime Editor containing a Cas9 protein capable of recognizing a CG or CGG PAM sequence. The PEgRNAs of Table 5 can also be used in Prime Editing systems further comprising a nick guide RNA (ngRNA). Such PEgRNAs and Prime Editing systems can be used, for example, to correct an R778L mutation in ATP7B.

[0279] The PEgRNAs exemplified in Table 5 comprise: (a) a spacer comprising at its 3′ end a sequence corresponding to sequence number 380; (b) a gRNA core capable of complexing with a Cas9 protein, and (c) an extension arm comprising: (i) an editing template at least 70 nucleotides in length and comprising at its 3′ end a sequence corresponding to any one of sequence numbers 404-407, and (ii) a prime binding site (PBS) comprising at its 5′ end a sequence corresponding to sequence number 387. The PEgRNA spacer can be, for example, 16-22 nucleotides in length and can comprise the sequence corresponding to any one of sequence numbers 380-386. In some embodiments, the PEgRNA spacer comprises sequence number 384. The PEgRNA spacers in Table 5 are annotated with their PAM sequence(s), enabling the selection of an appropriate Cas9 protein. The editing template can be referred to as a reverse transcription template (RTT). The editing template can encode wildtype ATP7B gene sequence. For example, the editing template can comprise at its 3′ end the sequence corresponding to sequence number 407, 409, 413, 419, 423, 427, 429, 432, 438, 442, 447, 450, 452, 457, 462, 467, 470, 473, 476, 482, 486, 491, 492, 497, 501, 506, 508, 514, 519, 521, or 524. Alternatively, the editing template can encode one or more synonymous mutations relative to the wildtype ATP7B gene. The editing template can encode one or more synonymous mutations that are PAM silencing mutations and can comprise at its 3′ end the sequence corresponding to sequence number 404, 405, 406, 408, 410, 411, 412, 414, 415, 416, 417, 418, 420, 421, 422, 424, 425, 426, 428, 430, 431, 433, 434, 435, 436, 437, 439, 440, 441, 443, 444, 445, 446, 448, 449, 451, 453, 454, 455, 456, 458, 459, 460, 461, 463, 464, 465, 466, 468, 469, 471, 472, 474, 475, 477, 478, 479, 480, 481, 483, 484, 485, 487, 488, 489, 490, 493, 494, 495, 496, 498, 499, 500, 502, 503, 504, 505, 507, 509, 510, 511, 512, 513, 515, 516, 517, 518, 520, 522, 523, 525, 526, or 527. The PBS can be, for example, 3 to 19 nucleotides in length and can comprise the sequence corresponding to any one of sequence numbers 387-403. In some cases, a PBS length of no more than 3 nucleotides less than the PEgRNA spacer length is chosen.

[0280] Any of the PEgRNAs of Table 5 can be used in a Prime Editing system further comprising a nick guide RNA (ngRNA). Such ngRNA can comprise a spacer comprising at its 3′ end a sequence corresponding to nucleotides 5-20 of any ngRNA spacer listed in Table 5 and a gRNA core capable of complexing with a Cas9 protein. For example, the sequence in the spacer of the ngRNA can comprise nucleotides 5-20, 4-20, 3-20, 2-20, or 1-20 of sequence number 61, 62, 63, 64, 65, 68, 70, 72, 76, 77, 78, 79, 81, 84, 85, 88, 90, 91, 92, 93, 95, 96, 97, 98, 99, 189, 293, 294, or 378. In some embodiments, the spacer of the ngRNA is a ngRNA spacer listed in Table 5. The ngRNA spacers in Table 5 are annotated with their PAM sequences, enabling selection of an appropriate Cas9 protein. It can be advantageous to select a ngRNA spacer that has a PAM sequence compatible with the Cas9 protein used in the Prime Editor, thus avoiding the need to use two different Cas9 proteins. The ngRNA is capable of directing a complexed Cas9 protein to bind the edit strand of the ATP7B gene; thus, a complexed Cas9 nickase containing a nuclease inactivating mutation in the HNH domain will nick the non-edit strand. A PE3 ngRNA spacer has perfect complementarity to the edit strand both pre- and post-edit; a PE3b ngRNA spacer has perfect complementarity to the edit strand post-edit; and a PE3* spacer has perfect complementarity to the edit strand post-edit with a PEgRNA containing an edit template encoding a PAM silencing mutation. Because some PAMs can be silenced by more than 1 synonymous mutation, edit templates (RTTs) encoding a PAM silencing mutation and ngRNA spacers having 100% complementary with the portion of the edit strand containing the encoded PAM silencing mutation are coded with a number following the asterisk (*). Exemplary ngRNA provided in Table 5 can comprise a sequence corresponding to sequence number 100, 101, 102, 103, 104, 105, 107, 108, 109, 110, 112, 113, 114, 115, 116, 117, or 118.

[0281] Table 6 provides Prime Editing guide RNAs (PEgRNAs) that can be used with any Prime Editor containing a Cas9 protein capable of recognizing a AG or AGG PAM sequence. The PEgRNAs of Table 6 can also be used in Prime Editing systems further comprising a nick guide RNA (ngRNA). Such PEgRNAs and Prime Editing systems can be used, for example, to correct an R778L mutation in ATP7B.

[0282] The PEgRNAs exemplified in Table 6 comprise: (a) a spacer comprising at its 3′ end a sequence corresponding to sequence number 528; (b) a gRNA core capable of complexing with a Cas9 protein, and (c) an extension arm comprising: (i) an editing template at least 65 nucleotides in length and comprising at its 3′ end a sequence corresponding to any one of sequence numbers 552-556, and (ii) a prime binding site (PBS) comprising at its 5′ end a sequence corresponding to sequence number 535. The PEgRNA spacer can be, for example, 16-22 nucleotides in length and can comprise the sequence corresponding to any one of sequence numbers 528-534. In some embodiments, the PEgRNA spacer comprises sequence number 532. The PEgRNA spacers in Table 6 are annotated with their PAM sequence(s), enabling the selection of an appropriate Cas9 protein. The editing template can be referred to as a reverse transcription template (RTT). The editing template can encode wildtype ATP7B gene sequence. For example, the editing template can comprise at its 3′ end the sequence corresponding to sequence number 556, 558, 565, 569, 576, 579, 583, 590, 594, 597, 603, 608, 614, 619, 622, 628, 633, 640, 643, 648, 654, 660, 662, 671, 674, 678, 682, 690, 694, 697, 703, 708, 712, 720, 722, or 728. Alternatively, the editing template can encode one or more synonymous mutations relative to the wildtype ATP7B gene. The editing template can encode one or more synonymous mutations that are PAM silencing mutations and can comprise at its 3′ end the sequence corresponding to sequence number 552, 553, 554, 555, 557, 559, 560, 561, 562, 563, 564, 566, 567, 568, 570, 571, 572, 573, 574, 575, 577, 578, 580, 581, 582, 584, 585, 586, 587, 588, 589, 591, 592, 593, 595, 596, 598, 599, 600, 601, 602, 604, 605, 606, 607, 609, 610, 611, 612, 613, 615, 616, 617, 618, 620, 621, 623, 624, 625, 626, 627, 629, 630, 631, 632, 634, 635, 636, 637, 638, 639, 641, 642, 644, 645, 646, 647, 649, 650, 651, 652, 653, 655, 656, 657, 658, 659, 661, 663, 664, 665, 666, 667, 668, 669, 670, 672, 673, 675, 676, 677, 679, 680, 681, 683, 684, 685, 686, 687, 688, 689, 691, 692, 693, 695, 696, 698, 699, 700, 701, 702, 704, 705, 706, 707, 709, 710, 711, 713, 714, 715, 716, 717, 718, 719, 721, 723, 724, 725, 726, 727, 729, 730, or 731. The PBS can be, for example, 3 to 19 nucleotides in length and can comprise the sequence corresponding to any one of sequence numbers 535-551. In some cases, a PBS length of no more than 3 nucleotides less than the PEgRNA spacer length is chosen.

[0283] Any of the PEgRNAs of Table 6 can be used in a Prime Editing system further comprising a nick guide RNA (ngRNA). Such ngRNA can comprise a spacer comprising at its 3′ end a sequence corresponding to nucleotides 5-20 of any ngRNA spacer listed in Table 6 and a gRNA core capable of complexing with a Cas9 protein. For example, the sequence in the spacer of the ngRNA can comprise nucleotides 5-20, 4-20, 3-20, 2-20, or 1-20 of sequence number 61, 62, 63, 64, 65, 68, 70, 72, 76, 77, 78, 79, 81, 84, 85, 88, 90, 91, 92, 93, 95, 96, 97, 98, 99, 189, 293, 294, 378, 732, or 733. In some embodiments, the spacer of the ngRNA is a ngRNA spacer listed in Table 6. The ngRNA spacers in Table 6 are annotated with their PAM sequences, enabling selection of an appropriate Cas9 protein. It can be advantageous to select a ngRNA spacer that has a PAM sequence compatible with the Cas9 protein used in the Prime Editor, thus avoiding the need to use two different Cas9 proteins. The ngRNA is capable of directing a complexed Cas9 protein to bind the edit strand of the ATP7B gene; thus, a complexed Cas9 nickase containing a nuclease inactivating mutation in the HNH domain will nick the non-edit strand. A PE3 ngRNA spacer has perfect complementarity to the edit strand both pre- and post-edit; a PE3b ngRNA spacer has perfect complementarity to the edit strand post-edit; and a PE3* spacer has perfect complementarity to the edit strand post-edit with a PEgRNA containing an edit template encoding a PAM silencing mutation. Because some PAMs can be silenced by more than 1 synonymous mutation, edit templates (RTTs) encoding a PAM silencing mutation and ngRNA spacers having 100% complementary with the portion of the edit strand containing the encoded PAM silencing mutation are coded with a number following the asterisk (*). Exemplary ngRNA provided in Table 6 can comprise a sequence corresponding to sequence number 100, 101, 102, 103, 104, 105, 107, 108, 109, 110, 112, 113, 114, 115, 116, 117, or 118.

[0284] Table 7 provides Prime Editing guide RNAs (PEgRNAs) that can be used with any Prime Editor containing a Cas9 protein capable of recognizing a TG, TGG, or TGGG PAM sequence. The PEgRNAs of Table 7 can also be used in Prime Editing systems further comprising a nick guide RNA (ngRNA). Such PEgRNAs and Prime Editing systems can be used, for example, to correct an R778L mutation in ATP7B.

[0285] The PEgRNAs exemplified in Table 7 comprise: (a) a spacer comprising at its 3′ end a sequence corresponding to sequence number 734; (b) a gRNA core capable of complexing with a Cas9 protein, and (c) an extension arm comprising: (i) an editing template at least 10 nucleotides in length and comprising at its 3′ end a sequence corresponding to any one of sequence numbers 757-761, and (ii) a prime binding site (PBS) comprising at its 5′ end a sequence corresponding to sequence number 200. The PEgRNA spacer can be, for example, 16-22 nucleotides in length and can comprise the sequence corresponding to any one of sequence numbers 734-740. In some embodiments, the PEgRNA spacer comprises sequence number 738. The PEgRNA spacers in Table 7 are annotated with their PAM sequence(s), enabling the selection of an appropriate Cas9 protein. The editing template can be referred to as a reverse transcription template (RTT). The editing template can encode wildtype ATP7B gene sequence. For example, the editing template can comprise at its 3′ end the sequence corresponding to sequence number 759, 764, 767, 774, 777, 785, 788, 796, 797, 802, 809, 812, 821, 823, 829, 833, 840, 845, 848, 854, 857, 862, 870, 874, 881, 886, 890, 896, 900, 903, 910, 914, 917, 924, 928, 936, 937, 946, 950, 956, 957, 963, 967, 972, 981, 985, 987, 993, 1000, 1006, 1009, 1014, 1018, 1023, 1027, 1032, 1038, 1043, 1048, 1052, 1058, 1063, 1067, 1076, 1080, 1085, 1088, 1096, 1099, 1104, 1107, 1113, 1117, 1124, 1128, 1133, 1140, 1146, 1151, 1155, 1161, 1162, 1167, 1175, 1181, 1186, 1189, 1193, 1199, 1205, or 1207. Alternatively, the editing template can encode one or more synonymous mutations relative to the wildtype ATP7B gene. The editing template can encode one or more synonymous mutations that are PAM silencing mutations and can comprise at its 3′ end the sequence corresponding to sequence number 757, 758, 760, 761, 762, 763, 765, 766, 768, 769, 770, 771, 772, 773, 775, 776, 778, 779, 780, 781, 782, 783, 784, 786, 787, 789, 790, 791, 792, 793, 794, 795, 798, 799, 800, 801, 803, 804, 805, 806, 807, 808, 810, 811, 813, 814, 815, 816, 817, 818, 819, 820, 822, 824, 825, 826, 827, 828, 830, 831, 832, 834, 835, 836, 837, 838, 839, 841, 842, 843, 844, 846, 847, 849, 850, 851, 852, 853, 855, 856, 858, 859, 860, 861, 863, 864, 865, 866, 867, 868, 869, 871, 872, 873, 875, 876, 877, 878, 879, 880, 882, 883, 884, 885, 887, 888, 889, 891, 892, 893, 894, 895, 897, 898, 899, 901, 902, 904, 905, 906, 907, 908, 909, 911, 912, 913, 915, 916, 918, 919, 920, 921, 922, 923, 925, 926, 927, 929, 930, 931, 932, 933, 934, 935, 938, 939, 940, 941, 942, 943, 944, 945, 947, 948, 949, 951, 952, 953, 954, 955, 958, 959, 960, 961, 962, 964, 965, 966, %8, 969, 970, 971, 973, 974, 975, 976, 977, 978, 979, 980, 982, 983, 984, 986, 988, 989, 990, 991, 992, 994, 995, 996, 997, 998, 999, 1001, 1002, 1003, 1004, 1005, 1007, 1008, 1010, 1011, 1012, 1013, 1015, 1016, 1017, 1019, 1020, 1021, 1022, 1024, 1025, 1026, 1028, 1029, 1030, 1031, 1033, 1034, 1035, 1036, 1037, 1039, 1040, 1041, 1042, 1044, 1045, 1046, 1047, 1049, 1050, 1051, 1053, 1054, 1055, 1056, 1057, 1059, 1060, 1061, 1062, 1064, 1065, 1066, 1068, 1069, 1070, 1071, 1072, 1073, 1074, 1075, 1077, 1078, 1079, 1081, 1082, 1083, 1084, 1086, 1087, 1089, 1090, 1091, 1092, 1093, 1094, 1095, 1097, 1098, 1100, 1101, 1102, 1103, 1105, 1106, 1108, 1109, 1110, 1111, 1112, 1114, 1115, 1116, 1118, 1119, 1120, 1121, 1122, 1123, 1125, 1126, 1127, 1129, 1130, 1131, 1132, 1134, 1135, 1136, 1137, 1138, 1139, 1141, 1142, 1143, 1144, 1145, 1147, 1148, 1149, 1150, 1152, 1153, 1154, 1156, 1157, 1158, 1159, 1160, 1163, 1164, 1165, 1166, 1168, 1169, 1170, 1171, 1172, 1173, 1174, 1176, 1177, 1178, 1179, 1180, 1182, 1183, 1184, 1185, 1187, 1188, 1190, 1191, 1192, 1194, 1195, 1196, 1197, 1198, 1200, 1201, 1202, 1203, 1204, 1206, 1208, 1209, 1210, or 1211. The PBS can be, for example, 3 to 19 nucleotides in length and can comprise the sequence corresponding to sequence number 200, 741, 742, 743, 744, 745, 746, 747, 748, 749, 750, 751, 752, 753, 754, 755, or 756. In some cases, a PBS length of no more than 3 nucleotides less than the PEgRNA spacer length is chosen.

[0286] The PEgRNA can comprise, from 5′ to 3′, the spacer, the gRNA core, the edit template, and the PBS. The 3′ end of the edit template can be contiguous with the 5′ end of the PBS. The PEgRNA can comprise multiple RNA molecules or can be a single RNA molecule. Exemplary PEgRNAs provided in Table 7 can comprise a sequence corresponding to any one of sequence numbers 1245-1524. Any PEgRNA exemplified in Table 7 may comprise, or further comprise, a 3′ motif at the 3′ end of the extension arm, for example, a hairpin-forming motif or a series of 1, 2, 3, 4, 5, 6, 7 or more U nucleotides. In some embodiments, the PEgRNA comprises 4 U nucleotides at its 3′ end. Without being bound by theory, such 3′ motifs are believed to increase PEgRNA stability. The PEgRNA may alternatively or additionally comprise one or more chemical modifications, such as phosphorothioate (PS) bond(s), 2′-O-methylated (2′-Ome) nucleotides, or a combination thereof. In some embodiments, the PEgRNA comprise 3′ mN*mN*mN*N and 5′mN*mN*mN* modifications, where m indicates that the nucleotide contains a 2′-O-Me modification and a * indicates the presence of a phosphorothioate bond. PEgRNA sequences exemplified in Table 7 may alternatively be adapted for expression from a DNA template, for example, by including a 5′ terminal G if the spacer of the PEgRNA begins with another nucleotide, by including 6 or 7 U nucleotides at the 3′ end of the extension arm, or both. Such expression-adapted sequences may further comprise a hairpin-forming motif between the PBS and the 3′ terminal U series.

[0287] Any of the PEgRNAs of Table 7 can be used in a Prime Editing system further comprising a nick guide RNA (ngRNA). Such ngRNA can comprise a spacer comprising at its 3′ end a sequence corresponding to nucleotides 5-20 of any ngRNA spacer listed in Table 7 and a gRNA core capable of complexing with a Cas9 protein. For example, the sequence in the spacer of the ngRNA can comprise nucleotides 5-20, 4-20, 3-20, 2-20, or 1-20 of sequence number 62, 63, 70, 79, 84, 88, 92, 93, 189, 293, 294, 378, 732, 733, 1212, 1213, 1214, 1215, 1216, 1217, 1218, 1219, 1220, 1221, 1222, 1223, 1224, 1225, 1226, 1227, 1228, 1229, 1230, 1231, 1232, 1233, 1234, 1235, 1236, 1237, 1238, 1239, 1240, 1241, 1242, 1243, or 1244. In some embodiments, the spacer of the ngRNA is a ngRNA spacer listed in Table 7. The ngRNA spacers in Table 7 are annotated with their PAM sequences, enabling selection of an appropriate Cas9 protein. It can be advantageous to select a ngRNA spacer that has a PAM sequence compatible with the Cas9 protein used in the Prime Editor, thus avoiding the need to use two different Cas9 proteins. The ngRNA is capable of directing a complexed Cas9 protein to bind the edit strand of the ATP7B gene; thus, a complexed Cas9 nickase containing a nuclease inactivating mutation in the HNH domain will nick the non-edit strand. A PE3 ngRNA spacer has perfect complementarity to the edit strand both pre- and post-edit; a PE3b ngRNA spacer has perfect complementarity to the edit strand post-edit; and a PE3* spacer has perfect complementarity to the edit strand post-edit with a PEgRNA containing an edit template encoding a PAM silencing mutation. Because some PAMs can be silenced by more than 1 synonymous mutation, edit templates (RTTs) encoding a PAM silencing mutation and ngRNA spacers having 100% complementary with the portion of the edit strand containing the encoded PAM silencing mutation are coded with a number following the asterisk (*). Exemplary ngRNA provided in Table 7 can comprise a sequence corresponding to sequence number 103, 104, 107, 114, 115, 116, 117, 1525, 1526, 1527, or 1528.

[0288] Table 8 provides Prime Editing guide RNAs (PEgRNAs) that can be used with any Prime Editor containing a Cas9 protein capable of recognizing a GG or GGG PAM sequence. The PEgRNAs of Table 8 can also be used in Prime Editing systems further comprising a nick guide RNA (ngRNA). Such PEgRNAs and Prime Editing systems can be used, for example, to correct an R778L mutation in ATP7B.

[0289] The PEgRNAs exemplified in Table 8 comprise: (a) a spacer comprising at its 3′ end a sequence corresponding to sequence number 1529; (b) a gRNA core capable of complexing with a Cas9 protein, and (c) an extension arm comprising: (i) an editing template at least 10 nucleotides in length and comprising at its 3′ end a sequence corresponding to sequence number 1553, and (ii) a prime binding site (PBS) comprising at its 5′ end a sequence corresponding to sequence number 1536. The PEgRNA spacer can be, for example, 16-22 nucleotides in length and can comprise the sequence corresponding to any one of sequence numbers 1529-1535. In some embodiments, the PEgRNA spacer comprises sequence number 1533. The PEgRNA spacers in Table 8 are annotated with their PAM sequence(s), enabling the selection of an appropriate Cas9 protein. The editing template can be referred to as a reverse transcription template (RTT). The editing template can encode wildtype ATP7B gene sequence. For example, the editing template can comprise at its 3′ end the sequence corresponding to any one of sequence numbers 1553-1643. Alternatively, the editing template can encode one or more synonymous mutations relative to the wildtype ATP7B gene. The PBS can be, for example, 3 to 19 nucleotides in length and can comprise the sequence corresponding to any one of sequence numbers 1536-1552. In some cases, a PBS length of no more than 3 nucleotides less than the PEgRNA spacer length is chosen.

[0290] The PEgRNA can comprise, from 5′ to 3′, the spacer, the gRNA core, the edit template, and the PBS. The 3′ end of the edit template can be contiguous with the 5′ end of the PBS. The PEgRNA can comprise multiple RNA molecules or can be a single RNA molecule. Exemplary PEgRNAs provided in Table 8 can comprise a sequence corresponding to any one of sequence numbers 1644-1727. Any PEgRNA exemplified in Table 8 may comprise, or further comprise, a 3′ motif at the 3′ end of the extension arm, for example, a hairpin-forming motif or a series of 1, 2, 3, 4, 5, 6, 7 or more U nucleotides. In some embodiments, the PEgRNA comprises 4 U nucleotides at its 3′ end. Without being bound by theory, such 3′ motifs are believed to increase PEgRNA stability. The PEgRNA may alternatively or additionally comprise one or more chemical modifications, such as phosphorothioate (PS) bond(s), 2′-O-methylated (2′-Ome) nucleotides, or a combination thereof. In some embodiments, the PEgRNA comprise 3′ mN*mN*mN*N and 5′mN*mN*mN* modifications, where m indicates that the nucleotide contains a 2′-O-Me modification and a * indicates the presence of a phosphorothioate bond. PEgRNA sequences exemplified in Table 8 may alternatively be adapted for expression from a DNA template, for example, by including a 5′ terminal G if the spacer of the PEgRNA begins with another nucleotide, by including 6 or 7 U nucleotides at the 3′ end of the extension arm, or both. Such expression-adapted sequences may further comprise a hairpin-forming motif between the PBS and the 3′ terminal U series.

[0291] Any of the PEgRNAs of Table 8 can be used in a Prime Editing system further comprising a nick guide RNA (ngRNA). Such ngRNA can comprise a spacer comprising at its 3′ end a sequence corresponding to nucleotides 5-20 of any ngRNA spacer listed in Table 8 and a gRNA core capable of complexing with a Cas9 protein. For example, the sequence in the spacer of the ngRNA can comprise nucleotides 5-20, 4-20, 3-20, 2-20, or 1-20 of sequence number 62, 63, 70, 84, 88, 92, 93, 189, 293, 294, 378, 732, 733, 1212, 1213, 1214, 1217, 1220, 1222, 1223, 1228, 1229, 1233, 1234, 1238, 1239, 1240, or 1243. In some embodiments, the spacer of the ngRNA is a ngRNA spacer listed in Table 8. The ngRNA spacers in Table 8 are annotated with their PAM sequences, enabling selection of an appropriate Cas9 protein. It can be advantageous to select a ngRNA spacer that has a PAM sequence compatible with the Cas9 protein used in the Prime Editor, thus avoiding the need to use two different Cas9 proteins. The ngRNA is capable of directing a complexed Cas9 protein to bind the edit strand of the ATP7B gene; thus, a complexed Cas9 nickase containing a nuclease inactivating mutation in the HNH domain will nick the non-edit strand. A PE3 ngRNA spacer has perfect complementarity to the edit strand both pre- and post-edit; a PE3b ngRNA spacer has perfect complementarity to the edit strand post-edit; and a PE3* spacer has perfect complementarity to the edit strand post-edit with a PEgRNA containing an edit template encoding a PAM silencing mutation. Because some PAMs can be silenced by more than 1 synonymous mutation, edit templates (RTTs) encoding a PAM silencing mutation and ngRNA spacers having 100% complementary with the portion of the edit strand containing the encoded PAM silencing mutation are coded with a number following the asterisk (*). Exemplary ngRNA provided in Table 8 can comprise a sequence corresponding to sequence number 103, 104, 107, 114, 115, 116, 117, 1525, 1526, 1527, or 1528.

[0292] Table 9 provides Prime Editing guide RNAs (PEgRNAs) that can be used with any Prime Editor containing a Cas9 protein capable of recognizing a TG or TGG PAM sequence. The PEgRNAs of Table 9 can also be used in Prime Editing systems further comprising a nick guide RNA (ngRNA). Such PEgRNAs and Prime Editing systems can be used, for example, to correct an R778L mutation in ATP7B.

[0293] The PEgRNAs exemplified in Table 9 comprise: (a) a spacer comprising at its 3′ end a sequence corresponding to sequence number 1728; (b) a gRNA core capable of complexing with a Cas9 protein, and (c) an extension arm comprising: (i) an editing template at least 10 nucleotides in length and comprising at its 3′ end a sequence corresponding to sequence number 1752, and (ii) a prime binding site (PBS) comprising at its 5′ end a sequence corresponding to sequence number 1735. The PEgRNA spacer can be, for example, 16-22 nucleotides in length and can comprise the sequence corresponding to any one of sequence numbers 1728-1734. In some embodiments, the PEgRNA spacer comprises sequence number 1732. The PEgRNA spacers in Table 9 are annotated with their PAM sequence(s), enabling the selection of an appropriate Cas9 protein. The editing template can be referred to as a reverse transcription template (RTT). The editing template can encode wildtype ATP7B gene sequence. For example, the editing template can comprise at its 3′ end the sequence corresponding to any one of sequence numbers 1752-1842. Alternatively, the editing template can encode one or more synonymous mutations relative to the wildtype ATP7B gene. The PBS can be, for example, 3 to 19 nucleotides in length and can comprise the sequence corresponding to any one of sequence numbers 1735-1751. In some cases, a PBS length of no more than 3 nucleotides less than the PEgRNA spacer length is chosen.

[0294] The PEgRNA can comprise, from 5′ to 3′, the spacer, the gRNA core, the edit template, and the PBS. The 3′ end of the edit template can be contiguous with the 5′ end of the PBS. The PEgRNA can comprise multiple RNA molecules or can be a single RNA molecule. Exemplary PEgRNAs provided in Table 9 can comprise a sequence corresponding to any one of sequence numbers 1846-1957. Any PEgRNA exemplified in Table 9 may comprise, or further comprise, a 3′ motif at the 3′ end of the extension arm, for example, a hairpin-forming motif or a series of 1, 2, 3, 4, 5, 6, 7 or more U nucleotides. In some embodiments, the PEgRNA comprises 4 U nucleotides at its 3′ end. Without being bound by theory, such 3′ motifs are believed to increase PEgRNA stability. The PEgRNA may alternatively or additionally comprise one or more chemical modifications, such as phosphorothioate (PS) bond(s), 2′-O-methylated (2′-Ome) nucleotides, or a combination thereof. In some embodiments, the PEgRNA comprise 3′ mN*mN*mN*N and 5′mN*mN*mN* modifications, where m indicates that the nucleotide contains a 2′-O-Me modification and a * indicates the presence of a phosphorothioate bond. PEgRNA sequences exemplified in Table 9 may alternatively be adapted for expression from a DNA template, for example, by including a 5′ terminal G if the spacer of the PEgRNA begins with another nucleotide, by including 6 or 7 U nucleotides at the 3′ end of the extension arm, or both. Such expression-adapted sequences may further comprise a hairpin-forming motif between the PBS and the 3′ terminal U series.

[0295] Any of the PEgRNAs of Table 9 can be used in a Prime Editing system further comprising a nick guide RNA (ngRNA). Such ngRNA can comprise a spacer comprising at its 3′ end a sequence corresponding to nucleotides 5-20 of any ngRNA spacer listed in Table 9 and a gRNA core capable of complexing with a Cas9 protein. For example, the sequence in the spacer of the ngRNA can comprise nucleotides 5-20, 4-20, 3-20, 2-20, or 1-20 of sequence number 62, 63, 84, 88, 189, 293, 294, 378, 732, 733, 1212, 1213, 1214, 1217, 1220, 1222, 1223, 1228, 1229, 1233, 1234, 1238, 1239, 1240, 1243, 1843, 1844, or 1845. In some embodiments, the spacer of the ngRNA is a ngRNA spacer listed in Table 9. The ngRNA spacers in Table 9 are annotated with their PAM sequences, enabling selection of an appropriate Cas9 protein. It can be advantageous to select a ngRNA spacer that has a PAM sequence compatible with the Cas9 protein used in the Prime Editor, thus avoiding the need to use two different Cas9 proteins. The ngRNA is capable of directing a complexed Cas9 protein to bind the edit strand of the ATP7B gene; thus, a complexed Cas9 nickase containing a nuclease inactivating mutation in the HNH domain will nick the non-edit strand. A PE3 ngRNA spacer has perfect complementarity to the edit strand both pre- and post-edit; a PE3b ngRNA spacer has perfect complementarity to the edit strand post-edit; and a PE3* spacer has perfect complementarity to the edit strand post-edit with a PEgRNA containing an edit template encoding a PAM silencing mutation. Because some PAMs can be silenced by more than 1 synonymous mutation, edit templates (RTTs) encoding a PAM silencing mutation and ngRNA spacers having 100% complementary with the portion of the edit strand containing the encoded PAM silencing mutation are coded with a number following the asterisk (*). Exemplary ngRNA provided in Table 9 can comprise a sequence corresponding to sequence number 107, 114, 115, 116, 1525, 1526, 1527, 1528, 1958, or 1959.

[0296] Table 10 provides Prime Editing guide RNAs (PEgRNAs) that can be used with any Prime Editor containing a Cas9 protein capable of recognizing a TG or TGG PAM sequence. The PEgRNAs of Table 10 can also be used in Prime Editing systems further comprising a nick guide RNA (ngRNA). Such PEgRNAs and Prime Editing systems can be used, for example, to correct an R778L mutation in ATP7B.

[0297] The PEgRNAs exemplified in Table 10 comprise: (a) a spacer comprising at its 3′ end a sequence corresponding to sequence number 1960; (b) a gRNA core capable of complexing with a Cas9 protein, and (c) an extension arm comprising: (i) an editing template at least 96 nucleotides in length and comprising at its 3′ end a sequence corresponding to sequence number 1984, and (ii) a prime binding site (PBS) comprising at its 5′ end a sequence corresponding to sequence number 1967. The PEgRNA spacer can be, for example, 16-22 nucleotides in length and can comprise the sequence corresponding to any one of sequence numbers 1960-1966. In some embodiments, the PEgRNA spacer comprises sequence number 1964. The PEgRNA spacers in Table 10 are annotated with their PAM sequence(s), enabling the selection of an appropriate Cas9 protein. The editing template can be referred to as a reverse transcription template (RTT). The editing template can encode wildtype ATP7B gene sequence. For example, the editing template can comprise at its 3′ end the sequence corresponding to any one of sequence numbers 1984-1988. Alternatively, the editing template can encode one or more synonymous mutations relative to the wildtype ATP7B gene. The PBS can be, for example, 3 to 19 nucleotides in length and can comprise the sequence corresponding to any one of sequence numbers 1967-1983. In some cases, a PBS length of no more than 3 nucleotides less than the PEgRNA spacer length is chosen.

[0298] Any of the PEgRNAs of Table 10 can be used in a Prime Editing system further comprising a nick guide RNA (ngRNA). Such ngRNA can comprise a spacer comprising at its 3′ end a sequence corresponding to nucleotides 5-20 of any ngRNA spacer listed in Table 10 and a gRNA core capable of complexing with a Cas9 protein. For example, the sequence in the spacer of the ngRNA can comprise nucleotides 5-20, 4-20, 3-20, 2-20, or 1-20 of sequence number 63, 88, 1989, 1990, 1991, 1992, 1993, 1994, 1995, 1996, 1997, 1998, 1999, 2000, 2001, 2002, 2003, 2004, 2005, 2006, 2007, 2008, or 2009. In some embodiments, the spacer of the ngRNA is a ngRNA spacer listed in Table 10. The ngRNA spacers in Table 10 are annotated with their PAM sequences, enabling selection of an appropriate Cas9 protein. It can be advantageous to select a ngRNA spacer that has a PAM sequence compatible with the Cas9 protein used in the Prime Editor, thus avoiding the need to use two different Cas9 proteins. The ngRNA is capable of directing a complexed Cas9 protein to bind the edit strand of the ATP7B gene; thus, a complexed Cas9 nickase containing a nuclease inactivating mutation in the HNH domain will nick the non-edit strand. A PE3 ngRNA spacer has perfect complementarity to the edit strand both pre- and post-edit; a PE3b ngRNA spacer has perfect complementarity to the edit strand post-edit; and a PE3* spacer has perfect complementarity to the edit strand post-edit with a PEgRNA containing an edit template encoding a PAM silencing mutation. Because some PAMs can be silenced by more than 1 synonymous mutation, edit templates (RTTs) encoding a PAM silencing mutation and ngRNA spacers having 100% complementary with the portion of the edit strand containing the encoded PAM silencing mutation are coded with a number following the asterisk (*). Exemplary ngRNA provided in Table 10 can comprise a sequence corresponding to sequence number 115, 116, 2010, 2011, 2012, 2013, 2014, 2015, or 2016.

[0299] Table 11 provides Prime Editing guide RNAs (PEgRNAs) that can be used with any Prime Editor containing a Cas9 protein capable of recognizing a AG or AGG PAM sequence. The PEgRNAs of Table 11 can also be used in Prime Editing systems further comprising a nick guide RNA (ngRNA). Such PEgRNAs and Prime Editing systems can be used, for example, to correct an R778L mutation in ATP7B.

[0300] The PEgRNAs exemplified in Table 11 comprise: (a) a spacer comprising at its 3′ end a sequence corresponding to sequence number 2017; (b) a gRNA core capable of complexing with a Cas9 protein, and (c) an extension arm comprising: (i) an editing template at least 86 nucleotides in length and comprising at its 3′ end a sequence corresponding to sequence number 2041, and (ii) a prime binding site (PBS) comprising at its 5′ end a sequence corresponding to sequence number 2024. The PEgRNA spacer can be, for example, 16-22 nucleotides in length and can comprise the sequence corresponding to any one of sequence numbers 2017-2023. In some embodiments, the PEgRNA spacer comprises sequence number 2021. The PEgRNA spacers in Table 11 are annotated with their PAM sequence(s), enabling the selection of an appropriate Cas9 protein. The editing template can be referred to as a reverse transcription template (RTT). The editing template can encode wildtype ATP7B gene sequence. For example, the editing template can comprise at its 3′ end the sequence corresponding to any one of sequence numbers 2041-2055. Alternatively, the editing template can encode one or more synonymous mutations relative to the wildtype ATP7B gene. The PBS can be, for example, 3 to 19 nucleotides in length and can comprise the sequence corresponding to any one of sequence numbers 2024-2040. In some cases, a PBS length of no more than 3 nucleotides less than the PEgRNA spacer length is chosen.

[0301] Any of the PEgRNAs of Table 11 can be used in a Prime Editing system further comprising a nick guide RNA (ngRNA). Such ngRNA can comprise a spacer comprising at its 3′ end a sequence corresponding to nucleotides 5-20 of any ngRNA spacer listed in Table 11 and a gRNA core capable of complexing with a Cas9 protein. For example, the sequence in the spacer of the ngRNA can comprise nucleotides 5-20, 4-20, 3-20, 2-20, or 1-20 of sequence number 63, 88, 1989, 1990, 1991, 1992, 1993, 1994, 1995, 1996, 1997, 1998, 1999, 2000, 2001, 2002, 2003, 2004, 2005, 2006, 2008, 2056, 2057, 2058, or 2059. In some embodiments, the spacer of the ngRNA is a ngRNA spacer listed in Table 11. The ngRNA spacers in Table 11 are annotated with their PAM sequences, enabling selection of an appropriate Cas9 protein. It can be advantageous to select a ngRNA spacer that has a PAM sequence compatible with the Cas9 protein used in the Prime Editor, thus avoiding the need to use two different Cas9 proteins. The ngRNA is capable of directing a complexed Cas9 protein to bind the edit strand of the ATP7B gene; thus, a complexed Cas9 nickase containing a nuclease inactivating mutation in the HNH domain will nick the non-edit strand. A PE3 ngRNA spacer has perfect complementarity to the edit strand both pre- and post-edit; a PE3b ngRNA spacer has perfect complementarity to the edit strand post-edit; and a PE3* spacer has perfect complementarity to the edit strand post-edit with a PEgRNA containing an edit template encoding a PAM silencing mutation. Because some PAMs can be silenced by more than 1 synonymous mutation, edit templates (RTTs) encoding a PAM silencing mutation and ngRNA spacers having 100% complementary with the portion of the edit strand containing the encoded PAM silencing mutation are coded with a number following the asterisk (*). Exemplary ngRNA provided in Table 11 can comprise a sequence corresponding to sequence number 115, 116, 2010, 2011, 2012, 2013, 2014, 2015, 2016, 2060, 2061, or 2062.

[0302] Table 12 provides Prime Editing guide RNAs (PEgRNAs) that can be used with any Prime Editor containing a Cas9 protein capable of recognizing a AG or AGG PAM sequence. The PEgRNAs of Table 12 can also be used in Prime Editing systems further comprising a nick guide RNA (ngRNA). Such PEgRNAs and Prime Editing systems can be used, for example, to correct an R778L mutation in ATP7B.

[0303] The PEgRNAs exemplified in Table 12 comprise: (a) a spacer comprising at its 3′ end a sequence corresponding to sequence number 2063; (b) a gRNA core capable of complexing with a Cas9 protein, and (c) an extension arm comprising: (i) an editing template at least 63 nucleotides in length and comprising at its 3′ end a sequence corresponding to sequence number 2087, and (ii) a prime binding site (PBS) comprising at its 5′ end a sequence corresponding to sequence number 2070. The PEgRNA spacer can be, for example, 16-22 nucleotides in length and can comprise the sequence corresponding to any one of sequence numbers 2063-2069. In some embodiments, the PEgRNA spacer comprises sequence number 2067. The PEgRNA spacers in Table 12 are annotated with their PAM sequence(s), enabling the selection of an appropriate Cas9 protein. The editing template can be referred to as a reverse transcription template (RTT). The editing template can encode wildtype ATP7B gene sequence. For example, the editing template can comprise at its 3′ end the sequence corresponding to any one of sequence numbers 2087-2124. Alternatively, the editing template can encode one or more synonymous mutations relative to the wildtype ATP7B gene. The PBS can be, for example, 3 to 19 nucleotides in length and can comprise the sequence corresponding to any one of sequence numbers 2070-2086. In some cases, a PBS length of no more than 3 nucleotides less than the PEgRNA spacer length is chosen.

[0304] Any of the PEgRNAs of Table 12 can be used in a Prime Editing system further comprising a nick guide RNA (ngRNA). Such ngRNA can comprise a spacer comprising at its 3′ end a sequence corresponding to nucleotides 5-20 of any ngRNA spacer listed in Table 12 and a gRNA core capable of complexing with a Cas9 protein. For example, the sequence in the spacer of the ngRNA can comprise nucleotides 5-20, 4-20, 3-20, 2-20, or 1-20 of sequence number 63, 88, 1989, 1990, 1992, 1993, 1994, 1995, 1996, 1997, 1998, 1999, 2000, 2001, 2002, 2003, 2004, 2005, 2006, 2008, 2056, 2057, 2058, 2059, 2125, 2126, or 2127. In some embodiments, the spacer of the ngRNA is a ngRNA spacer listed in Table 12. The ngRNA spacers in Table 12 are annotated with their PAM sequences, enabling selection of an appropriate Cas9 protein. It can be advantageous to select a ngRNA spacer that has a PAM sequence compatible with the Cas9 protein used in the Prime Editor, thus avoiding the need to use two different Cas9 proteins. The ngRNA is capable of directing a complexed Cas9 protein to bind the edit strand of the ATP7B gene; thus, a complexed Cas9 nickase containing a nuclease inactivating mutation in the HNH domain will nick the non-edit strand. A PE3 ngRNA spacer has perfect complementarity to the edit strand both pre- and post-edit; a PE3b ngRNA spacer has perfect complementarity to the edit strand post-edit; and a PE3* spacer has perfect complementarity to the edit strand post-edit with a PEgRNA containing an edit template encoding a PAM silencing mutation. Because some PAMs can be silenced by more than 1 synonymous mutation, edit templates (RTTs) encoding a PAM silencing mutation and ngRNA spacers having 100% complementary with the portion of the edit strand containing the encoded PAM silencing mutation are coded with a number following the asterisk (*). Exemplary ngRNA provided in Table 12 can comprise a sequence corresponding to sequence number 115, 116, 2010, 2011, 2012, 2013, 2014, 2015, 2016, 2060, 2061, or 2062.

[0305] Table 13 provides Prime Editing guide RNAs (PEgRNAs) that can be used with any Prime Editor containing a Cas9 protein capable of recognizing a AG or AGG PAM sequence. The PEgRNAs of Table 13 can also be used in Prime Editing systems further comprising a nick guide RNA (ngRNA). Such PEgRNAs and Prime Editing systems can be used, for example, to correct an R778L mutation in ATP7B.

[0306] The PEgRNAs exemplified in Table 13 comprise: (a) a spacer comprising at its 3′ end a sequence corresponding to sequence number 2128; (b) a gRNA core capable of complexing with a Cas9 protein, and (c) an extension arm comprising: (i) an editing template at least 10 nucleotides in length and comprising at its 3′ end a sequence corresponding to any one of sequence numbers 2152-2163, and (ii) a prime binding site (PBS) comprising at its 5′ end a sequence corresponding to sequence number 2135. The PEgRNA spacer can be, for example, 16-22 nucleotides in length and can comprise the sequence corresponding to any one of sequence numbers 2128-2134. In some embodiments, the PEgRNA spacer comprises sequence number 2132. The PEgRNA spacers in Table 13 are annotated with their PAM sequence(s), enabling the selection of an appropriate Cas9 protein. The editing template can be referred to as a reverse transcription template (RTT). The editing template can encode wildtype ATP7B gene sequence. For example, the editing template can comprise at its 3′ end the sequence corresponding to sequence number 2162, 2175, 2180, 2191, 2209, 2223, 2226, 2238, 2256, 2263, 2279, 2295, 2307, 2313, 2324, 2338, 2348, 2360, 2372, 2380, 2394, 2406, 2423, 2436, 2447, 2454, 2469, 2487, 2494, 2503, 2522, 2533, 2546, 2559, 2567, 2576, 2587, 2601, 2619, 2620, 2638, 2652, 2665, 2671, 2682, 2701, 2712, 2724, 2732, 2747, 2758, 2765, 2785, 2798, 2804, 2814, 2825, 2839, 2858, 2865, 2875, 2887, 2906, 2913, 2927, 2941, 2944, 2956, 2968, 2982, 2996, 3012, 3019, 3038, 3047, 3061, 3073, 3084, 3092, 3102, 3114, 3125, 3145, 3159, 3165, 3180, 3184, 3206, 3214, 3227, or 3242. Alternatively, the editing template can encode one or more synonymous mutations relative to the wildtype ATP7B gene. The editing template can encode one or more synonymous mutations that are PAM silencing mutations and can comprise at its 3′ end the sequence corresponding to sequence number 2152, 2153, 2154, 2155, 2156, 2157, 2158, 2159, 2160, 2161, 2163, 2164, 2165, 2166, 2167, 2168, 2169, 2170, 2171, 2172, 2173, 2174, 2176, 2177, 2178, 2179, 2181, 2182, 2183, 2184, 2185, 2186, 2187, 2188, 2189, 2190, 2192, 2193, 2194, 2195, 2196, 2197, 2198, 2199, 2200, 2201, 2202, 2203, 2204, 2205, 2206, 2207, 2208, 2210, 2211, 2212, 2213, 2214, 2215, 2216, 2217, 2218, 2219, 2220, 2221, 2222, 2224, 2225, 2227, 2228, 2229, 2230, 2231, 2232, 2233, 2234, 2235, 2236, 2237, 2239, 2240, 2241, 2242, 2243, 2244, 2245, 2246, 2247, 2248, 2249, 2250, 2251, 2252, 2253, 2254, 2255, 2257, 2258, 2259, 2260, 2261, 2262, 2264, 2265, 2266, 2267, 2268, 2269, 2270, 2271, 2272, 2273, 2274, 2275, 2276, 2277, 2278, 2280, 2281, 2282, 2283, 2284, 2285, 2286, 2287, 2288, 2289, 2290, 2291, 2292, 2293, 2294, 2296, 2297, 2298, 2299, 2300, 2301, 2302, 2303, 2304, 2305, 2306, 2308, 2309, 2310, 2311, 2312, 2314, 2315, 2316, 2317, 2318, 2319, 2320, 2321, 2322, 2323, 2325, 2326, 2327, 2328, 2329, 2330, 2331, 2332, 2333, 2334, 2335, 2336, 2337, 2339, 2340, 2341, 2342, 2343, 2344, 2345, 2346, 2347, 2349, 2350, 2351, 2352, 2353, 2354, 2355, 2356, 2357, 2358, 2359, 2361, 2362, 2363, 2364, 2365, 2366, 2367, 2368, 2369, 2370, 2371, 2373, 2374, 2375, 2376, 2377, 2378, 2379, 2381, 2382, 2383, 2384, 2385, 2386, 2387, 2388, 2389, 2390, 2391, 2392, 2393, 2395, 2396, 2397, 2398, 2399, 2400, 2401, 2402, 2403, 2404, 2405, 2407, 2408, 2409, 2410, 2411, 2412, 2413, 2414, 2415, 2416, 2417, 2418, 2419, 2420, 2421, 2422, 2424, 2425, 2426, 2427, 2428, 2429, 2430, 2431, 2432, 2433, 2434, 2435, 2437, 2438, 2439, 2440, 2441, 2442, 2443, 2444, 2445, 2446, 2448, 2449, 2450, 2451, 2452, 2453, 2455, 2456, 2457, 2458, 2459, 2460, 2461, 2462, 2463, 2464, 2465, 2466, 2467, 2468, 2470, 2471, 2472, 2473, 2474, 2475, 2476, 2477, 2478, 2479, 2480, 2481, 2482, 2483, 2484, 2485, 2486, 2488, 2489, 2490, 2491, 2492, 2493, 2495, 2496, 2497, 2498, 2499, 2500, 2501, 2502, 2504, 2505, 2506, 2507, 2508, 2509, 2510, 2511, 2512, 2513, 2514, 2515, 2516, 2517, 2518, 2519, 2520, 2521, 2523, 2524, 2525, 2526, 2527, 2528, 2529, 2530, 2531, 2532, 2534, 2535, 2536, 2537, 2538, 2539, 2540, 2541, 2542, 2543, 2544, 2545, 2547, 2548, 2549, 2550, 2551, 2552, 2553, 2554, 2555, 2556, 2557, 2558, 2560, 2561, 2562, 2563, 2564, 2565, 2566, 2568, 2569, 2570, 2571, 2572, 2573, 2574, 2575, 2577, 2578, 2579, 2580, 2581, 2582, 2583, 2584, 2585, 2586, 2588, 2589, 2590, 2591, 2592, 2593, 2594, 2595, 2596, 2597, 2598, 2599, 2600, 2602, 2603, 2604, 2605, 2606, 2607, 2608, 2609, 2610, 2611, 2612, 2613, 2614, 2615, 2616, 2617, 2618, 2621, 2622, 2623, 2624, 2625, 2626, 2627, 2628, 2629, 2630, 2631, 2632, 2633, 2634, 2635, 2636, 2637, 2639, 2640, 2641, 2642, 2643, 2644, 2645, 2646, 2647, 2648, 2649, 2650, 2651, 2653, 2654, 2655, 2656, 2657, 2658, 2659, 2660, 2661, 2662, 2663, 2664, 2666, 2667, 2668, 2669, 2670, 2672, 2673, 2674, 2675, 2676, 2677, 2678, 2679, 2680, 2681, 2683, 2684, 2685, 2686, 2687, 2688, 2689, 2690, 2691, 2692, 2693, 2694, 2695, 2696, 2697, 2698, 2699, 2700, 2702, 2703, 2704, 2705, 2706, 2707, 2708, 2709, 2710, 2711, 2713, 2714, 2715, 2716, 2717, 2718, 2719, 2720, 2721, 2722, 2723, 2725, 2726, 2727, 2728, 2729, 2730, 2731, 2733, 2734, 2735, 2736, 2737, 2738, 2739, 2740, 2741, 2742, 2743, 2744, 2745, 2746, 2748, 2749, 2750, 2751, 2752, 2753, 2754, 2755, 2756, 2757, 2759, 2760, 2761, 2762, 2763, 2764, 2766, 2767, 2768, 2769, 2770, 2771, 2772, 2773, 2774, 2775, 2776, 2777, 2778, 2779, 2780, 2781, 2782, 2783, 2784, 2786, 2787, 2788, 2789, 2790, 2791, 2792, 2793, 2794, 2795, 2796, 2797, 2799, 2800, 2801, 2802, 2803, 2805, 2806, 2807, 2808, 2809, 2810, 2811, 2812, 2813, 2815, 2816, 2817, 2818, 2819, 2820, 2821, 2822, 2823, 2824, 2826, 2827, 2828, 2829, 2830, 2831, 2832, 2833, 2834, 2835, 2836, 2837, 2838, 2840, 2841, 2842, 2843, 2844, 2845, 2846, 2847, 2848, 2849, 2850, 2851, 2852, 2853, 2854, 2855, 2856, 2857, 2859, 2860, 2861, 2862, 2863, 2864, 2866, 2867, 2868, 2869, 2870, 2871, 2872, 2873, 2874, 2876, 2877, 2878, 2879, 2880, 2881, 2882, 2883, 2884, 2885, 2886, 2888, 2889, 2890, 2891, 2892, 2893, 2894, 2895, 2896, 2897, 2898, 2899, 2900, 2901, 2902, 2903, 2904, 2905, 2907, 2908, 2909, 2910, 2911, 2912, 2914, 2915, 2916, 2917, 2918, 2919, 2920, 2921, 2922, 2923, 2924, 2925, 2926, 2928, 2929, 2930, 2931, 2932, 2933, 2934, 2935, 2936, 2937, 2938, 2939, 2940, 2942, 2943, 2945, 2946, 2947, 2948, 2949, 2950, 2951, 2952, 2953, 2954, 2955, 2957, 2958, 2959, 2960, 2961, 2962, 2963, 2964, 2965, 2966, 2967, 2969, 2970, 2971, 2972, 2973, 2974, 2975, 2976, 2977, 2978, 2979, 2980, 2981, 2983, 2984, 2985, 2986, 2987, 2988, 2989, 2990, 2991, 2992, 2993, 2994, 2995, 2997, 2998, 2999, 3000, 3001, 3002, 3003, 3004, 3005, 3006, 3007, 3008, 3009, 3010, 3011, 3013, 3014, 3015, 3016, 3017, 3018, 3020, 3021, 3022, 3023, 3024, 3025, 3026, 3027, 3028, 3029, 3030, 3031, 3032, 3033, 3034, 3035, 3036, 3037, 3039, 3040, 3041, 3042, 3043, 3044, 3045, 3046, 3048, 3049, 3050, 3051, 3052, 3053, 3054, 3055, 3056, 3057, 3058, 3059, 3060, 3062, 3063, 3064, 3065, 3066, 3067, 3068, 3069, 3070, 3071, 3072, 3074, 3075, 3076, 3077, 3078, 3079, 3080, 3081, 3082, 3083, 3085, 3086, 3087, 3088, 3089, 3090, 3091, 3093, 3094, 3095, 3096, 3097, 3098, 3099, 3100, 3101, 3103, 3104, 3105, 3106, 3107, 3108, 3109, 3110, 3111, 3112, 3113, 3115, 3116, 3117, 3118, 3119, 3120, 3121, 3122, 3123, 3124, 3126, 3127, 3128, 3129, 3130, 3131, 3132, 3133, 3134, 3135, 3136, 3137, 3138, 3139, 3140, 3141, 3142, 3143, 3144, 3146, 3147, 3148, 3149, 3150, 3151, 3152, 3153, 3154, 3155, 3156, 3157, 3158, 3160, 3161, 3162, 3163, 3164, 3166, 3167, 3168, 3169, 3170, 3171, 3172, 3173, 3174, 3175, 3176, 3177, 3178, 3179, 3181, 3182, 3183, 3185, 3186, 3187, 3188, 3189, 3190, 3191, 3192, 3193, 3194, 3195, 3196, 3197, 3198, 3199, 3200, 3201, 3202, 3203, 3204, 3205, 3207, 3208, 3209, 3210, 3211, 3212, 3213, 3215, 3216, 3217, 3218, 3219, 3220, 3221, 3222, 3223, 3224, 3225, 3226, 3228, 3229, 3230, 3231, 3232, 3233, 3234, 3235, 3236, 3237, 3238, 3239, 3240, 3241, or 3243. The PBS can be, for example, 3 to 19 nucleotides in length and can comprise the sequence corresponding to any one of sequence numbers 2135-2151. In some cases, a PBS length of no more than 3 nucleotides less than the PEgRNA spacer length is chosen.

[0307] The PEgRNA can comprise, from 5′ to 3′, the spacer, the gRNA core, the edit template, and the PBS. The 3′ end of the edit template can be contiguous with the 5′ end of the PBS. The PEgRNA can comprise multiple RNA molecules or can be a single RNA molecule. Exemplary PEgRNAs provided in Table 13 can comprise a sequence corresponding to any one of sequence numbers 3300-4083. Any PEgRNA exemplified in Table 13 may comprise, or further comprise, a 3′ motif at the 3′ end of the extension arm, for example, a hairpin-forming motif or a series of 1, 2, 3, 4, 5, 6, 7 or more U nucleotides. In some embodiments, the PEgRNA comprises 4 U nucleotides at its 3′ end. Without being bound by theory, such 3′ motifs are believed to increase PEgRNA stability. The PEgRNA may alternatively or additionally comprise one or more chemical modifications, such as phosphorothioate (PS) bond(s), 2′-O-methylated (2′-Ome) nucleotides, or a combination thereof. In some embodiments, the PEgRNA comprise 3′ mN*mN*mN*N and 5′mN*mN*mN* modifications, where m indicates that the nucleotide contains a 2′-O-Me modification and a * indicates the presence of a phosphorothioate bond. PEgRNA sequences exemplified in Table 13 may alternatively be adapted for expression from a DNA template, for example, by including a 5′ terminal G if the spacer of the PEgRNA begins with another nucleotide, by including 6 or 7 U nucleotides at the 3′ end of the extension arm, or both. Such expression-adapted sequences may further comprise a hairpin-forming motif between the PBS and the 3′ terminal U series.

[0308] Any of the PEgRNAs of Table 13 can be used in a Prime Editing system further comprising a nick guide RNA (ngRNA). Such ngRNA can comprise a spacer comprising at its 3′ end a sequence corresponding to nucleotides 5-20 of any ngRNA spacer listed in Table 13 and a gRNA core capable of complexing with a Cas9 protein. For example, the sequence in the spacer of the ngRNA can comprise nucleotides 5-20, 4-20, 3-20, 2-20, or 1-20 of sequence number 63, 88, 1994, 2000, 2004, 2005, 2006, 2056, 2057, 2058, 2059, 2125, 2126, 2127, 3244, 3245, 3246, 3247, 3248, 3249, 3250, 3251, 3252, 3253, 3254, 3255, 3256, 3257, 3258, 3259, 3260, 3261, 3262, 3263, 3264, 3265, 3266, 3267, 3268, 3269, 3270, 3271, 3272, 3273, 3274, 3275, 3276, 3277, 3278, 3279, 3280, 3281, 3282, 3283, 3284, 3285, 3286, 3287, 3288, 3289, 3290, 3291, 3292, 3293, 3294, 3295, 3296, 3297, 3298, or 3299. In some embodiments, the spacer of the ngRNA is a ngRNA spacer listed in Table 13. The ngRNA spacers in Table 13 are annotated with their PAM sequences, enabling selection of an appropriate Cas9 protein. It can be advantageous to select a ngRNA spacer that has a PAM sequence compatible with the Cas9 protein used in the Prime Editor, thus avoiding the need to use two different Cas9 proteins. The ngRNA is capable of directing a complexed Cas9 protein to bind the edit strand of the ATP7B gene; thus, a complexed Cas9 nickase containing a nuclease inactivating mutation in the HNH domain will nick the non-edit strand. A PE3 ngRNA spacer has perfect complementarity to the edit strand both pre- and post-edit; a PE3b ngRNA spacer has perfect complementarity to the edit strand post-edit; and a PE3* spacer has perfect complementarity to the edit strand post-edit with a PEgRNA containing an edit template encoding a PAM silencing mutation. Because some PAMs can be silenced by more than 1 synonymous mutation, edit templates (RTTs) encoding a PAM silencing mutation and ngRNA spacers having 100% complementary with the portion of the edit strand containing the encoded PAM silencing mutation are coded with a number following the asterisk (*). Exemplary ngRNA provided in Table 13 can comprise a sequence corresponding to sequence number 115, 116, 2012, 2013, 2015, 2016, 2060, 2061, 2062, 4084, 4085, 4086, 4087, 4088, 4089, 4090, 4091, 4092, 4093, 4094, 4095, 4096, 4097, 4098, 4099, 4100, 4101, 4102, 4103, 4104, 4105, 4106, 4107, 4108, 4109, 4110, 4111, 4112, 4113, 4114, 4115, 4116, 4117, 4118, 4119, 4120, 4121, 4122, 4123, 4124, 4125, 4126, or 4127.

[0309] Exemplary PEgRNA and ngRNA from Table 13 are further excerpted in Table 107 below. All these sequences contained in Table 107 are RNA sequences; however, the Us are presented as Ts to be consistent with ST.26 convention

TABLE 107
Exemplary PEgRNA and ngRNA from Table 13

| Description | Sequence |
|---|---|
| PEgRNA: | TTGCCAAGTGTTCCAGCCACGTTTTAGAGCTAGAAATAGCAAGTTAAAATAAGGCTAGTCC |
| | GTTATCAACTTGAAAAAGTGGCACCGAGTCGGTGCATTGCCCTGGGAAGGTGGCTGGAACT |
| | TTT (SEQ ID NO: 14769) |
| | Spacer: TTGCCAAGTGTTCCAGCCAC (SEQ ID NO: 2132; Length: 20) |
| | RTT: ATTGCCCTGGGAAGGTG (SEQ ID NO: 2237; Length: 17; Encodes |
| | CGG-to-CTT PAM silencing synonymous mutation) |
| | PBS: GCTGGAAC (Sequence number: 2140; Length: 8) |
| PEgRNA: | TTGCCAAGTGTTCCAGCCACGTTTTAGAGCTAGAAATAGCAAGTTAAAATAAGGCTAGTCC |
| | GTTATCAACTTGAAAAAGTGGCACCGAGTCGGTGCGCCCTGGGAAGGTGGCTGGAACACTT |
| | TT (SEQ ID NO: 14770) |
| | Spacer: TTGCCAAGTGTTCCAGCCAC (SEQ ID NO: 2132; Length: 20) |
| | RTT: GCCCTGGGAAGGTG (SEQ ID NO: 2205; Length: 14; Encodes |
| | CGG-to-CTT PAM silencing synonymous mutation) |
| | PBS: GCTGGAACAC (SEQ ID NO: 2142; Length: 10) |
| PEgRNA: | TTGCCAAGTGTTCCAGCCACGTTTTAGAGCTAGAAATAGCAAGTTAAAATAAGGCTAGTCC |
| | GTTATCAACTTGAAAAAGTGGCACCGAGTCGGTGCTGCCCTGGGACGGTGGCTGGAACACT |
| | TTT (SEQ ID NO: 14771) |
| | Spacer: TTGCCAAGTGTTCCAGCCAC (SEQ ID NO: 2132; Length: 20) |
| | RTT: TGCCCTGGGACGGTG (SEQ ID NO: 2218; Length: 15; Encodes |
| | CGG-to-CGT PAM silencing synonymous mutation) |
| | PBS: GCTGGAACAC (SEQ ID NO: 2142; Length: 10) |
| PERNA: | TTGCCAAGTGTTCCAGCCACGTTTTAGAGCTAGAAATAGCAAGTTAAAATAAGGCTAGTCC |
| | GTTATCAACTTGAAAAAGTGGCACCGAGTCGGTGCTGCCCTGGGAAGGTGGCTGGAACACT |
| | TTT (SEQ ID NO: 14772) |
| | Spacer: TTGCCAAGTGTTCCAGCCAC (SEQ ID NO: 2132; Length: 20) |
| | RTT: TGCCCTGGGAAGGTG (SEQ ID NO: 2212; Length: 15; Encodes |
| | CGG-to-CTT PAM silencing synonymous mutation) |
| | PBS: GCTGGAACAC (SEQ ID NO: 2142; Length: 10) |
| PEgRNA: | TTGCCAAGTGTTCCAGCCACGTTTTAGAGCTAGAAATAGCAAGTTAAAATAAGGCTAGTCC |
| | GTTATCAACTTGAAAAAGTGGCACCGAGTCGGTGCTTGCCCTGGGGCGGTGGCTGGAACAC |
| | TTTT (SEQ ID NO: 14773) |
| | Spacer: TTGCCAAGTGTTCCAGCCAC (SEQ ID NO: 2132; Length: 20) |
| | RTT: TTGCCCTGGGGCGGTG (SEQ ID NO: 2235; Length: 16; Encodes |
| | CGG-to-CGC PAM silencing synonymous mutation) |
| | PBS: GCTGGAACAC (SEQ ID NO: 2142; Length: 10) |
| PEgRNA: | TTGCCAAGTGTTCCAGCCACGTTTTAGAGCTAGAAATAGCAAGTTAAAATAAGGCTAGTCC |
| | GTTATCAACTTGAAAAAGTGGCACCGAGTCGGTGCTTGCCCTGGGACGGTGGCTGGAACAC |
| | TTTT (SEQ ID NO: 14774) |
| | Spacer: TTGCCAAGTGTTCCAGCCAC (SEQ ID NO: 2132; Length: 20) |
| | RTT: TTGCCCTGGGACGGTG (SEQ ID NO: 2232; Length: 16; Encodes |
| | CGG-to-CGT PAM silencing synonymous mutation) |
| | PBS: GCTGGAACAC (SEQ ID NO: 2142; Length: 10) |
| PEgRNA: | TTGCCAAGTGTTCCAGCCACGTTTTAGAGCTAGAAATAGCAAGTTAAAATAAGGCTAGTCC |
| | GTTATCAACTTGAAAAAGTGGCACCGAGTCGGTGCTTGCCCTGGGGAGGTGGCTGGAACAC |
| | TTTT (SEQ ID NO: 14775) |
| | Spacer: TTGCCAAGTGTTCCAGCCAC (SEQ ID NO: 2132; Length: 20) |
| | RTT: TTGCCCTGGGGAGGTG (SEQ ID NO: 2229; Length: 16; Encodes |
| | CGG-to-CTC PAM silencing synonymous mutation) |
| | PBS: GCTGGAACAC (SEQ ID NO: 2142; Length: 10) |
| PEgRNA: | TTGCCAAGTGTTCCAGCCACGTTTTAGAGCTAGAAATAGCAAGTTAAAATAAGGCTAGTCC |
| | GTTATCAACTTGAAAAAGTGGCACCGAGTCGGTGCTTGCCCTGGGAAGGTGGCTGGAACAC |
| | TTTT (SEQ ID NO: 14776) |
| | Spacer: TTGCCAAGTGTTCCAGCCAC (SEQ ID NO: 2132; Length: 20) |
| | RTT: TTGCCCTGGGAAGGTG (SEQ ID NO: 2233; Length: 16; Encodes |
| | CGG-to-CTT PAM silencing synonymous mutation) |
| | PBS: GCTGGAACAC (SEQ ID NO: 2142; Length: 10) |
| PEgRNA: | TTGCCAAGTGTTCCAGCCACGTTTTAGAGCTAGAAATAGCAAGTTAAAATAAGGCTAGTCC |
| | GTTATCAACTTGAAAAAGTGGCACCGAGTCGGTGCATTGCCCTGGGTCGGTGGCTGGAACA |
| | CTTTT (SEQ ID NO: 14777) |
| | Spacer: TTGCCAAGTGTTCCAGCCAC (SEQ ID NO: 2132; Length: 20) |
| | RTT: ATTGCCCTGGGTCGGTG (SEQ ID NO: 2245; Length: 17; Encodes |
| | CGG-to-CGA PAM silencing synonymous mutation) |
| | PBS: GCTGGAACAC (SEQ ID NO: 2142; Length: 10) |
| PEgRNA: | TTGCCAAGTGTTCCAGCCACGTTTTAGAGCTAGAAATAGCAAGTTAAAATAAGGCTAGTCC |
| | GTTATCAACTTGAAAAAGTGGCACCGAGTCGGTGCATTGCCCTGGGGCGGTGGCTGGAACA |
| | CTTTT (SEQ ID NO: 14778) |
| | Spacer: TTGCCAAGTGTTCCAGCCAC (SEQ ID NO: 2132; Length: 20) |
| | RTT: ATTGCCCTGGGGCGGTG (SEQ ID NO: 2240; Length: 17; Encodes |
| | CGG-to-CGC PAM silencing synonymous mutation) |
| | PBS: GCTGGAACAC (SEQ ID NO: 2142; Length: 10) |
| PERNA: | TTGCCAAGTGTTCCAGCCACGTTTTAGAGCTAGAAATAGCAAGTTAAAATAAGGCTAGTCC |
| | GTTATCAACTTGAAAAAGTGGCACCGAGTCGGTGCATTGCCCTGGGACGGTGGCTGGAACA |
| | CTTTT (SEQ ID NO: 14779) |
| | Spacer: TTGCCAAGTGTTCCAGCCAC (SEQ ID NO: 2132; Length: 20) |
| | RTT: ATTGCCCTGGGACGGTG (SEQ ID NO: 2242; Length: 17; Encodes |
| | CGG-to-CGT PAM silencing synonymous mutation) |
| | PBS: GCTGGAACAC (SEQ ID NO: 2142; Length: 10) |
| PEgRNA: | TTGCCAAGTGTTCCAGCCACGTTTTAGAGCTAGAAATAGCAAGTTAAAATAAGGCTAGTCC |
| | GTTATCAACTTGAAAAAGTGGCACCGAGTCGGTGCATTGCCCTGGGTAGGTGGCTGGAACA |
| | CTTTT (SEQ ID NO: 14780) |
| | Spacer: TTGCCAAGTGTTCCAGCCAC (SEQ ID NO: 2132; Length: 20) |
| | RTT: ATTGCCCTGGGTAGGTG (SEQ ID NO: 2243; Length: 17; Encodes |
| | CGG-to-CTA PAM silencing synonymous mutation) |
| | PBS: GCTGGAACAC (SEQ ID NO: 2142; Length: 10) |
| PERNA: | TTGCCAAGTGTTCCAGCCACGTTTTAGAGCTAGAAATAGCAAGTTAAAATAAGGCTAGTCC |
| | GTTATCAACTTGAAAAAGTGGCACCGAGTCGGTGCATTGCCCTGGGGAGGTGGCTGGAACA |
| | CTTTT (SEQ ID NO: 14781) |
| | Spacer: TTGCCAAGTGTTCCAGCCAC (SEQ ID NO: 2132; Length: 20) |
| | RTT: ATTGCCCTGGGGAGGTG (SEQ ID NO: 2236; Length: 17; Encodes |
| | CGG-to-CTC PAM silencing synonymous mutation) |
| | PBS: GCTGGAACAC (SEQ ID NO: 2142; Length: 10) |
| PEgRNA: | TTGCCAAGTGTTCCAGCCACGTTTTAGAGCTAGAAATAGCAAGTTAAAATAAGGCTAGTCC |
| | GTTATCAACTTGAAAAAGTGGCACCGAGTCGGTGCATTGCCCTGGGCAGGTGGCTGGAACA |
| | CTTTT (SEQ ID NO: 14782) |
| | Spacer: TTGCCAAGTGTTCCAGCCAC (SEQ ID NO: 2132; Length: 20) |
| | RTT: ATTGCCCTGGGCAGGTG (SEQ ID NO: 2244; Length: 17; Encodes |
| | CGG-to-CTG PAM silencing synonymous mutation) |
| | PBS: GCTGGAACAC (SEQ ID NO: 2142; Length: 10) |
| PEgRNA: | TTGCCAAGTGTTCCAGCCACGTTTTAGAGCTAGAAATAGCAAGTTAAAATAAGGCTAGTCC |
| | GTTATCAACTTGAAAAAGTGGCACCGAGTCGGTGCATTGCCCTGGGAAGGTGGCTGGAACA |
| | CTTTT (SEQ ID NO: 14783) |
| | Spacer: TTGCCAAGTGTTCCAGCCAC (SEQ ID NO: 2132; Length: 20) |
| | RTT: ATTGCCCTGGGAAGGTG (SEQ ID NO: 2237; Length: 17; Encodes |
| | CGG-to-CTT PAM silencing synonymous mutation) |
| | PBS: GCTGGAACAC (SEQ ID NO: 2142; Length: 10) |
| PEgRNA: | TTGCCAAGTGTTCCAGCCACGTTTTAGAGCTAGAAATAGCAAGTTAAAATAAGGCTAGTCC |
| | GTTATCAACTTGAAAAAGTGGCACCGAGTCGGTGCTCATTGCCCTGGGGCGGTGGCTGGAA |
| | CACTTTT (SEQ ID NO: 14784) |
| | Spacer: TTGCCAAGTGTTCCAGCCAC (SEQ ID NO: 2132; Length: 20) |
| | RTT: TCATTGCCCTGGGGCGGTG (SEQ ID NO: 2269; Length: 19; |
| | Encodes CGG-to-CGC PAM silencing synonymous mutation) |
| | PBS: GCTGGAACAC (SEQ ID NO: 2142; Length: 10) |
| PEgRNA: | TTGCCAAGTGTTCCAGCCACGTTTTAGAGCTAGAAATAGCAAGTTAAAATAAGGCTAGTCC |
| | GTTATCAACTTGAAAAAGTGGCACCGAGTCGGTGCTCATTGCCCTGGGACGGTGGCTGGAA |
| | CACTTTT (SEQ ID NO: 14785) |
| | Spacer: TTGCCAAGTGTTCCAGCCAC (SEQ ID NO: 2132; Length: 20) |
| | RTT: TCATTGCCCTGGGACGGTG (SEQ ID NO: 2271; Length: 19; |
| | Encodes CGG-to-CGT PAM silencing synonymous mutation) |
| | PBS: GCTGGAACAC (SEQ ID NO: 2142; Length: 10) |
| PEgRNA: | TTGCCAAGTGTTCCAGCCACGTTTTAGAGCTAGAAATAGCAAGTTAAAATAAGGCTAGTCC |
| | GTTATCAACTTGAAAAAGTGGCACCGAGTCGGTGCTCATTGCCCTGGGGAGGTGGCTGGAA |
| | CACTTTT (SEQ ID NO: 14786) |
| | Spacer: TTGCCAAGTGTTCCAGCCAC (SEQ ID NO: 2132; Length: 20) |
| | RTT: TCATTGCCCTGGGGAGGTG (SEQ ID NO: 2264; Length: 19; |
| | Encodes CGG-to-CTC PAM silencing synonymous mutation) |
| | PBS: GCTGGAACAC (SEQ ID NO: 2142; Length: 10) |
| PEgRNA: | TTGCCAAGTGTTCCAGCCACGTTTTAGAGCTAGAAATAGCAAGTTAAAATAAGGCTAGTCC |
| | GTTATCAACTTGAAAAAGTGGCACCGAGTCGGTGCTTCATTGCCCTGGGCAGGTGGCTGGA |
| | ACACTTTT (SEQ ID NO: 14787) |
| | Spacer: TTGCCAAGTGTTCCAGCCAC (SEQ ID NO: 2132; Length: 20) |
| | RTT: TTCATTGCCCTGGGCAGGTG (SEQ ID NO: 2272; Length: 20; |
| | Encodes CGG-to-CTG PAM silencing synonymous mutation) |
| | PBS: GCTGGAACAC (SEQ ID NO: 2142; Length: 10) |
| PEgRNA: | TTGCCAAGTGTTCCAGCCACGTTTTAGAGCTAGAAATAGCAAGTTAAAATAAGGCTAGTCC |
| | GTTATCAACTTGAAAAAGTGGCACCGAGTCGGTGCGCCCTGGGAAGGTGGCTGGAACACTT |
| | TTTT (SEQ ID NO: 14788) |
| | Spacer: TTGCCAAGTGTTCCAGCCAC (SEQ ID NO: 2132; Length: 20) |
| | RTT: GCCCTGGGAAGGTG (SEQ ID NO: 2205; Length: 14; Encodes |
| | CGG-to-CTT PAM silencing synonymous mutation) |
| | PBS: GCTGGAACACTT (SEQ ID NO: 2144; Length: 12) |
| PEgRNA: | TTGCCAAGTGTTCCAGCCACGTTTTAGAGCTAGAAATAGCAAGTTAAAATAAGGCTAGTCC |
| | GTTATCAACTTGAAAAAGTGGCACCGAGTCGGTGCTTGCCCTGGGAAGGTGGCTGGAACAC |
| | TTTTTT (SEQ ID NO: 14789) |
| | Spacer: TTGCCAAGTGTTCCAGCCAC (SEQ ID NO: 2132; Length: 20) |
| | RTT: TTGCCCTGGGAAGGTG (SEQ ID NO: 2233; Length: 16; Encodes |
| | CGG-to-CTT PAM silencing synonymous mutation) |
| | PBS: GCTGGAACACTT (SEQ ID NO: 2144; Length: 12) |
| PEgRNA: | TTGCCAAGTGTTCCAGCCACGTTTTAGAGCTAGAAATAGCAAGTTAAAATAAGGCTAGTCC |
| | GTTATCAACTTGAAAAAGTGGCACCGAGTCGGTGCATTGCCCTGGGGCGGTGGCTGGAACA |
| | CTTTTTT (SEQ ID NO: 14790) |
| | Spacer: TTGCCAAGTGTTCCAGCCAC (SEQ ID NO: 2132; Length: 20) |
| | RTT: ATTGCCCTGGGGCGGTG (SEQ ID NO: 2240; Length: 17; Encodes |
| | CGG-to-CGC PAM silencing synonymous mutation) |
| | PBS: GCTGGAACACTT (SEQ ID NO: 2144; Length: 12) |
| PEgRNA: | TTGCCAAGTGTTCCAGCCACGTTTTAGAGCTAGAAATAGCAAGTTAAAATAAGGCTAGTCC |
| | GTTATCAACTTGAAAAAGTGGCACCGAGTCGGTGCATTGCCCTGGGGCGGTGGCTGGAACA |
| | CTTGGTTTT (SEQ ID NO: 14791) |
| | Spacer: TTGCCAAGTGTTCCAGCCAC (SEQ ID NO: 2132; Length: 20) |
| | RTT: ATTGCCCTGGGGCGGTG (SEQ ID NO: 2240; Length: 17; Encodes |
| | CGG-to-CGC PAM silencing synonymous mutation) |
| | PBS: GCTGGAACACTTGG (SEQ ID NO: 2146; Length: 14) |
| PEgRNA: | TTGCCAAGTGTTCCAGCCACGTTTTAGAGCTAGAAATAGCAAGTTAAAATAAGGCTAGTCC |
| | GTTATCAACTTGAAAAAGTGGCACCGAGTCGGTGCATTGCCCTGGGGCGGTGGCTGGAACA |
| | CTTGTTTT (SEQ ID NO: 14792) |
| | Spacer: TTGCCAAGTGTTCCAGCCAC (SEQ ID NO: 2132; Length: 20) |
| | RTT: ATTGCCCTGGGGCGGTG (SEQ ID NO: 2240; Length: 17; Encodes |
| | CGG-to-CGC PAM silencing synonymous mutation) |
| | PBS: GCTGGAACACTTG (SEQ ID NO: 2145; Length: 13) |
| PEgRNA: | TTGCCAAGTGTTCCAGCCACGTTTTAGAGCTAGAAATAGCAAGTTAAAATAAGGCTAGTCC |
| | GTTATCAACTTGAAAAAGTGGCACCGAGTCGGTGCGCCCTGGGAAGGTGGCTGGAACTTTT |
| | (SEQ ID NO: 14793) |
| | Spacer: TTGCCAAGTGTTCCAGCCAC (SEQ ID NO: 2132; Length: 20) |
| | RTT: GCCCTGGGAAGGTG (SEQ ID NO: 2205; Length: 14; Encodes |
| | CGG-to-CTT PAM silencing synonymous mutation) |
| | PBS: GCTGGAAC (SEQ ID NO: 2140; Length: 8) |
| PEgRNA: | TTGCCAAGTGTTCCAGCCACGTTTTAGAGCTAGAAATAGCAAGTTAAAATAAGGCTAGTCC |
| | GTTATCAACTTGAAAAAGTGGCACCGAGTCGGTGCATTGCCCTGGGTCGGTGGCTGGAACA |
| | CTTTTTT (SEQ ID NO: 14794) |
| | Spacer: TTGCCAAGTGTTCCAGCCAC (SEQ ID NO: 2132; Length: 20) |
| | RTT: ATTGCCCTGGGTCGGTG (SEQ ID NO: 2245; Length: 17; Encodes |
| | CGG-to-CGA PAM silencing synonymous mutation) |
| | PBS: GCTGGAACACTT (SEQ ID NO: 2144; Length: 12) |
| PEgRNA: | TTGCCAAGTGTTCCAGCCACGTTTTAGAGCTAGAAATAGCAAGTTAAAATAAGGCTAGTCC |
| | GTTATCAACTTGAAAAAGTGGCACCGAGTCGGTGCATTGCCCTGGGGCGGTGGCTGGAACA |
| | CTTTTTT (SEQ ID NO: 14790) |
| | Spacer: TTGCCAAGTGTTCCAGCCAC (SEQ ID NO: 2132; Length: 20) |
| | RTT: ATTGCCCTGGGGCGGTG (SEQ ID NO: 2240; Length: 17; Encodes |
| | CGG-to-CGC PAM silencing synonymous mutation) |
| | PBS: GCTGGAACACTT (SEQ ID NO: 2144; Length: 12) |
| PERNA: | TTGCCAAGTGTTCCAGCCACGTTTTAGAGCTAGAAATAGCAAGTTAAAATAAGGCTAGTCC |
| | GTTATCAACTTGAAAAAGTGGCACCGAGTCGGTGCTTCATTGCCCTGGGGCGGTGGCTGGA |
| | ACACTTGGTTTT (SEQ ID NO: 14796) |
| | Spacer: TTGCCAAGTGTTCCAGCCAC (SEQ ID NO: 2132; Length: 20) |
| | RTT: TTCATTGCCCTGGGGCGGTG (SEQ ID NO: 2277; Length: 20; |
| | Encodes CGG-to-CGC PAM silencing synonymous mutation) |
| | PBS: GCTGGAACACTTGG (SEQ ID NO: 2146; Length: 14) |
| PEgRNA: | TTGCCAAGTGTTCCAGCCACGTTTTAGAGCTAGAAATAGCAAGTTAAAATAAGGCTAGTCC |
| | GTTATCAACTTGAAAAAGTGGCACCGAGTCGGTGCTTCATTGCCCTGGGTAGGTGGCTGGA |
| | ACACTTTTTT (SEQ ID NO: 14797) |
| | Spacer: TTGCCAAGTGTTCCAGCCAC (SEQ ID NO: 2132; Length: 20) |
| | RTT: TTCATTGCCCTGGGTAGGTG (SEQ ID NO: 2281; Length: 20; |
| | Encodes CGG-to-CTA PAM silencing synonymous mutation) |
| | PBS: GCTGGAACACTT (SEQ ID NO: 2144; Length: 12) |
| PEgRNA: | TTGCCAAGTGTTCCAGCCACGTTTTAGAGCTAGAAATAGCAAGTTAAAATAAGGCTAGTCC |
| | GTTATCAACTTGAAAAAGTGGCACCGAGTCGGTGCTTCATTGCCCTGGGAAGGTGGCTGGA |
| | ACACTTTTTT (SEQ ID NO: 14798) |
| | Spacer: TTGCCAAGTGTTCCAGCCAC (SEQ ID NO: 2132; Length: 20) |
| | RTT: TTCATTGCCCTGGGAAGGTG (SEQ ID NO: 2274; Length: 20; |
| | Encodes CGG-to-CTT PAM silencing synonymous mutation) |
| | PBS: GCTGGAACACTT (SEQ ID NO: 2144; Length: 12) |
| PERNA: | GTTGCCAAGTGTTCCAGCCACGTTTTAGAGCTAGAAATAGCAAGTTAAAATAAGGCTAGTC |
| | CGTTATCAACTTGAAAAAGTGGCACCGAGTCGGTGCTCATTGCCCTGGGGCGGTGGCTGGA |
| | ACACTTTT (SEQ ID NO: 14799) |
| | Spacer: TTGCCAAGTGTTCCAGCCAC (SEQ ID NO: 2132; Length: 20) |
| | RTT: TCATTGCCCTGGGGCGGTG (SEQ ID NO: 2269; Length: 19; |
| | Encodes CGG-to-CGC PAM silencing synonymous mutation) |
| | PBS: GCTGGAACAC (SEQ ID NO: 2142; Length: 10) |
| PE3 | GGTTGCTGTGGCTGAGAAGGGTTTTAGAGCTAGAAATAGCAAGTTAAAATAAGGCTAGTCC |
| ngRNA: | GTTATCAACTTGAAAAAGTGGCACCGAGTCGGTGCTTTT (SEQ ID NO: 14800) |
| | Spacer: GGTTGCTGTGGCTGAGAAGG (SEQ ID NO: 3269) |
| PE3 | GGTCATCCTGGTGGTTGCTGGTTTTAGAGCTAGAAATAGCAAGTTAAAATAAGGCTAGTCC |
| ngRNA: | GTTATCAACTTGAAAAAGTGGCACCGAGTCGGTGCTTTT (SEQ ID NO: 14801) |
| | Spacer: GGTCATCCTGGTGGTTGCTG (SEQ ID NO: 3279) |
| PE3b | TGTTCATTGCCCTGGGCCGGGTTTTAGAGCTAGAAATAGCAAGTTAAAATAAGGCTAGTCC |
| ngRNA: | GTTATCAACTTGAAAAAGTGGCACCGAGTCGGTGCTTTT (SEQ ID NO: 14802) |
| | Spacer: TGTTCATTGCCCTGGGCCGG (SEQ ID NO: 1994) |
| PE3b* | TGTTCATTGCCCTGGGACGGGTTTTAGAGCTAGAAATAGCAAGTTAAAATAAGGCTAGTCC |
| ngRNA: | GTTATCAACTTGAAAAAGTGGCACCGAGTCGGTGCTTTT (SEQ ID NO: 14803) |
| | Spacer: TGTTCATTGCCCTGGGACGG (SEQ ID NO: 3247; Complementary |
| | to edited strand containing a CGG-to-CGT synonymous PAM |
| | silencing mutation) |
| PE3b* | TGTTCATTGCCCTGGGGAGGGTTTTAGAGCTAGAAATAGCAAGTTAAAATAAGGCTAGTCC |
| ngRNA: | GTTATCAACTTGAAAAAGTGGCACCGAGTCGGTGCTTTT (SEQ ID NO: 14804) |
| | Spacer: TGTTCATTGCCCTGGGGAGG (SEQ ID NO: 3249; Complementary |
| | to edited strand containing a CGG-to-CTC synonymous PAM |
| | silencing mutation) |
| PE3b* | TGTTCATTGCCCTGGGAAGGGTTTTAGAGCTAGAAATAGCAAGTTAAAATAAGGCTAGTCC |
| ngRNA: | GTTATCAACTTGAAAAAGTGGCACCGAGTCGGTGCTTTT (SEQ ID NO: 14805) |
| | Spacer: TGTTCATTGCCCTGGGAAGG (SEQ ID NO: 3267; Complementary |
| | to edited strand containing a CGG-to-CTT synonymous PAM |
| | silencing mutation) |
| PE3b* | TGTTCATTGCCCTGGGCAGGGTTTTAGAGCTAGAAATAGCAAGTTAAAATAAGGCTAGTCC |
| ngRNA: | GTTATCAACTTGAAAAAGTGGCACCGAGTCGGTGCTTTT (SEQ ID NO: 14806) |
| | Spacer: TGTTCATTGCCCTGGGCAGG (SEQ ID NO: 3288; Complementary |
| | to edited strand containing a CGG-to-CTG synonymous PAM |
| | silencing mutation) |
| PE3b* | TGTTCATTGCCCTGGGGGGGGTTTTAGAGCTAGAAATAGCAAGTTAAAATAAGGCTAGTCC |
| ngRNA: | GTTATCAACTTGAAAAAGTGGCACCGAGTCGGTGCTTTT (SEQ ID NO: 14807) |
| | Spacer: TGTTCATTGCCCTGGGGCGG (SEQ ID NO: 3299; Complementary |
| | to edited strand containing a CGG-to-CGC synonymous PAM |
| | silencing mutation) |
| PE3b* | TGTTCATTGCCCTGGGTCGGGTTTTAGAGCTAGAAATAGCAAGTTAAAATAAGGCTAGTCC |
| ngRNA: | GTTATCAACTTGAAAAAGTGGCACCGAGTCGGTGCTTTT (SEQ ID NO: 14808) |
| | Spacer: TGTTCATTGCCCTGGGTCGG (SEQ ID NO: 3272; Complementary |
| | to edited strand containing a CGG-to-CGA synonymous PAM |
| | silencing mutation) |
| PE3b* | TGTTCATTGCCCTGGGTAGGGTTTTAGAGCTAGAAATAGCAAGTTAAAATAAGGCTAGTCC |
| ngRNA: | GTTATCAACTTGAAAAAGTGGCACCGAGTCGGTGCTTTT (SEQ ID NO: 14809) |
| | Spacer: TGTTCATTGCCCTGGGTAGG (SEQ ID NO: 3258; Complementary |
| | to edited strand containing a CGG-to-CTA synonymous PAM |
| | silencing mutation) |

[0310] 14 provides Prime Editing guide RNAs (PEgRNAs) that can be used with any Prime Editor containing a Cas9 protein capable of recognizing a TG or TGA PAM sequence. The PEgRNAs of Table 14 can also be used in Prime Editing systems further comprising a nick guide RNA (ngRNA). Such PEgRNAs and Prime Editing systems can be used, for example, to correct an R778L mutation in ATP7B.

[0311] The PEgRNAs exemplified in Table 14 comprise: (a) a spacer comprising at its 3′ end a sequence corresponding to sequence number 4128; (b) a gRNA core capable of complexing with a Cas9 protein, and (c) an extension arm comprising: (i) an editing template at least 78 nucleotides in length and comprising at its 3′ end a sequence corresponding to sequence number 4152, and (ii) a prime binding site (PBS) comprising at its 5′ end a sequence corresponding to sequence number 4135. The PEgRNA spacer can be, for example, 16-22 nucleotides in length and can comprise the sequence corresponding to any one of sequence numbers 4128-4134. In some embodiments, the PEgRNA spacer comprises sequence number 4132. The PEgRNA spacers in Table 14 are annotated with their PAM sequence(s), enabling the selection of an appropriate Cas9 protein. The editing template can be referred to as a reverse transcription template (RTT). The editing template can encode wildtype ATP7B gene sequence. For example, the editing template can comprise at its 3′ end the sequence corresponding to any one of sequence numbers 4152-4174. Alternatively, the editing template can encode one or more synonymous mutations relative to the wildtype ATP7B gene. The PBS can be, for example, 3 to 19 nucleotides in length and can comprise the sequence corresponding to any one of sequence numbers 4135-4151. In some cases, a PBS length of no more than 3 nucleotides less than the PEgRNA spacer length is chosen.

[0312] Any of the PEgRNAs of Table 14 can be used in a Prime Editing system further comprising a nick guide RNA (ngRNA). Such ngRNA can comprise a spacer comprising at its 3′ end a sequence corresponding to nucleotides 5-20 of any ngRNA spacer listed in Table 14 and a gRNA core capable of complexing with a Cas9 protein. For example, the sequence in the spacer of the ngRNA can comprise nucleotides 5-20, 4-20, 3-20, 2-20, or 1-20 of sequence number 60, 61, 62, 64, 65, 68, 69, 70, 72, 76, 77, 78, 79, 81, 84, 85, 90, 91, 92, 93, 95, 96, 97, 98, 99, 189, 293, 294, 378, or 4175. In some embodiments, the spacer of the ngRNA is a ngRNA spacer listed in Table 14. The ngRNA spacers in Table 14 are annotated with their PAM sequences, enabling selection of an appropriate Cas9 protein. It can be advantageous to select a ngRNA spacer that has a PAM sequence compatible with the Cas9 protein used in the Prime Editor, thus avoiding the need to use two different Cas9 proteins. The ngRNA is capable of directing a complexed Cas9 protein to bind the edit strand of the ATP7B gene; thus, a complexed Cas9 nickase containing a nuclease inactivating mutation in the HNH domain will nick the non-edit strand. A PE3 ngRNA spacer has perfect complementarity to the edit strand both pre- and post-edit; a PE3b ngRNA spacer has perfect complementarity to the edit strand post-edit; and a PE3* spacer has perfect complementarity to the edit strand post-edit with a PEgRNA containing an edit template encoding a PAM silencing mutation. Because some PAMs can be silenced by more than 1 synonymous mutation, edit templates (RTTs) encoding a PAM silencing mutation and ngRNA spacers having 100% complementary with the portion of the edit strand containing the encoded PAM silencing mutation are coded with a number following the asterisk (*). Exemplary ngRNA provided in Table 14 can comprise a sequence corresponding to sequence number 100, 101, 102, 103, 104, 105, 107, 108, 109, 110, 112, 113, 114, 117, or 118.

[0313] Table 15 provides Prime Editing guide RNAs (PEgRNAs) that can be used with any Prime Editor containing a Cas9 protein capable of recognizing a AG or AGA PAM sequence. The PEgRNAs of Table 15 can also be used in Prime Editing systems further comprising a nick guide RNA (ngRNA). Such PEgRNAs and Prime Editing systems can be used, for example, to correct an R778L mutation in ATP7B.

[0314] The PEgRNAs exemplified in Table 15 comprise: (a) a spacer comprising at its 3′ end a sequence corresponding to sequence number 4176; (b) a gRNA core capable of complexing with a Cas9 protein, and (c) an extension arm comprising: (i) an editing template at least 76 nucleotides in length and comprising at its 3′ end a sequence corresponding to any one of sequence numbers 4200-4201, and (ii) a prime binding site (PBS) comprising at its 5′ end a sequence corresponding to sequence number 4183. The PEgRNA spacer can be, for example, 16-22 nucleotides in length and can comprise the sequence corresponding to any one of sequence numbers 4176-4182. In some embodiments, the PEgRNA spacer comprises sequence number 4180. The PEgRNA spacers in Table 15 are annotated with their PAM sequence(s), enabling the selection of an appropriate Cas9 protein. The editing template can be referred to as a reverse transcription template (RTT). The editing template can encode wildtype ATP7B gene sequence. For example, the editing template can comprise at its 3′ end the sequence corresponding to sequence number 4200, 4203, 4204, 4207, 4209, 4210, 4213, 4215, 4216, 4218, 4221, 4223, 4225, 4226, 4228, 4231, 4232, 4235, 4236, 4239, 4241, 4243, 4244, 4247, or 4248. Alternatively, the editing template can encode one or more synonymous mutations relative to the wildtype ATP7B gene. The editing template can encode one or more synonymous mutations that are PAM silencing mutations and can comprise at its 3′ end the sequence corresponding to sequence number 4201, 4202, 4205, 4206, 4208, 4211, 4212, 4214, 4217, 4219, 4220, 4222, 4224, 4227, 4229, 4230, 4233, 4234, 4237, 4238, 4240, 4242, 4245, 4246, or 4249. The PBS can be, for example, 3 to 19 nucleotides in length and can comprise the sequence corresponding to any one of sequence numbers 4183-4199. In some cases, a PBS length of no more than 3 nucleotides less than the PEgRNA spacer length is chosen.

[0315] Any of the PEgRNAs of Table 15 can be used in a Prime Editing system further comprising a nick guide RNA (ngRNA). Such ngRNA can comprise a spacer comprising at its 3′ end a sequence corresponding to nucleotides 5-20 of any ngRNA spacer listed in Table 15 and a gRNA core capable of complexing with a Cas9 protein. For example, the sequence in the spacer of the ngRNA can comprise nucleotides 5-20, 4-20, 3-20, 2-20, or 1-20 of sequence number 60, 61, 62, 64, 65, 68, 70, 72, 76, 77, 78, 79, 81, 84, 85, 90, 91, 92, 93, 95, 96, 97, 98, 99, 189, 293, 294, 378, 4175, or 4250. In some embodiments, the spacer of the ngRNA is a ngRNA spacer listed in Table 15. The ngRNA spacers in Table 15 are annotated with their PAM sequences, enabling selection of an appropriate Cas9 protein. It can be advantageous to select a ngRNA spacer that has a PAM sequence compatible with the Cas9 protein used in the Prime Editor, thus avoiding the need to use two different Cas9 proteins. The ngRNA is capable of directing a complexed Cas9 protein to bind the edit strand of the ATP7B gene; thus, a complexed Cas9 nickase containing a nuclease inactivating mutation in the HNH domain will nick the non-edit strand. A PE3 ngRNA spacer has perfect complementarity to the edit strand both pre- and post-edit; a PE3b ngRNA spacer has perfect complementarity to the edit strand post-edit; and a PE3* spacer has perfect complementarity to the edit strand post-edit with a PEgRNA containing an edit template encoding a PAM silencing mutation. Because some PAMs can be silenced by more than 1 synonymous mutation, edit templates (RTTs) encoding a PAM silencing mutation and ngRNA spacers having 100% complementary with the portion of the edit strand containing the encoded PAM silencing mutation are coded with a number following the asterisk (*). Exemplary ngRNA provided in Table 15 can comprise a sequence corresponding to sequence number 100, 101, 102, 103, 104, 105, 107, 108, 109, 110, 112, 113, 114, 117, or 118.

[0316] Table 16 provides Prime Editing guide RNAs (PEgRNAs) that can be used with any Prime Editor containing a Cas9 protein capable of recognizing a GG or GGA PAM sequence. The PEgRNAs of Table 16 can also be used in Prime Editing systems further comprising a nick guide RNA (ngRNA). Such PEgRNAs and Prime Editing systems can be used, for example, to correct an R778L mutation in ATP7B.

[0317] The PEgRNAs exemplified in Table 16 comprise: (a) a spacer comprising at its 3′ end a sequence corresponding to sequence number 4251; (b) a gRNA core capable of complexing with a Cas9 protein, and (c) an extension arm comprising: (i) an editing template at least 69 nucleotides in length and comprising at its 3′ end a sequence corresponding to sequence number 4275, and (ii) a prime binding site (PBS) comprising at its 5′ end a sequence corresponding to sequence number 4258. The PEgRNA spacer can be, for example, 16-22 nucleotides in length and can comprise the sequence corresponding to any one of sequence numbers 4251-4257. In some embodiments, the PEgRNA spacer comprises sequence number 4255. The PEgRNA spacers in Table 16 are annotated with their PAM sequence(s), enabling the selection of an appropriate Cas9 protein. The editing template can be referred to as a reverse transcription template (RTT). The editing template can encode wildtype ATP7B gene sequence. For example, the editing template can comprise at its 3′ end the sequence corresponding to any one of sequence numbers 4275-4306. Alternatively, the editing template can encode one or more synonymous mutations relative to the wildtype ATP7B gene. The PBS can be, for example, 3 to 19 nucleotides in length and can comprise the sequence corresponding to any one of sequence numbers 4258-4274. In some cases, a PBS length of no more than 3 nucleotides less than the PEgRNA spacer length is chosen.

[0318] Any of the PEgRNAs of Table 16 can be used in a Prime Editing system further comprising a nick guide RNA (ngRNA). Such ngRNA can comprise a spacer comprising at its 3′ end a sequence corresponding to nucleotides 5-20 of any ngRNA spacer listed in Table 16 and a gRNA core capable of complexing with a Cas9 protein. For example, the sequence in the spacer of the ngRNA can comprise nucleotides 5-20, 4-20, 3-20, 2-20, or 1-20 of sequence number 61, 62, 64, 65, 68, 70, 72, 76, 77, 78, 79, 81, 84, 85, 90, 91, 92, 93, 95, 96, 97, 98, 99, 189, 293, 294, 378, 733, or 4175. In some embodiments, the spacer of the ngRNA is a ngRNA spacer listed in Table 16. The ngRNA spacers in Table 16 are annotated with their PAM sequences, enabling selection of an appropriate Cas9 protein. It can be advantageous to select a ngRNA spacer that has a PAM sequence compatible with the Cas9 protein used in the Prime Editor, thus avoiding the need to use two different Cas9 proteins. The ngRNA is capable of directing a complexed Cas9 protein to bind the edit strand of the ATP7B gene; thus, a complexed Cas9 nickase containing a nuclease inactivating mutation in the HNH domain will nick the non-edit strand. A PE3 ngRNA spacer has perfect complementarity to the edit strand both pre- and post-edit; a PE3b ngRNA spacer has perfect complementarity to the edit strand post-edit; and a PE3* spacer has perfect complementarity to the edit strand post-edit with a PEgRNA containing an edit template encoding a PAM silencing mutation. Because some PAMs can be silenced by more than 1 synonymous mutation, edit templates (RTTs) encoding a PAM silencing mutation and ngRNA spacers having 100% complementary with the portion of the edit strand containing the encoded PAM silencing mutation are coded with a number following the asterisk (*). Exemplary ngRNA provided in Table 16 can comprise a sequence corresponding to sequence number 100, 101, 102, 103, 104, 105, 107, 108, 109, 110, 112, 113, 114, 117, or 118.

[0319] Table 17 provides Prime Editing guide RNAs (PEgRNAs) that can be used with any Prime Editor containing a Cas9 protein capable of recognizing a AG or AGA PAM sequence. The PEgRNAs of Table 17 can also be used in Prime Editing systems further comprising a nick guide RNA (ngRNA). Such PEgRNAs and Prime Editing systems can be used, for example, to correct an R778L mutation in ATP7B.

[0320] The PEgRNAs exemplified in Table 17 comprise: (a) a spacer comprising at its 3′ end a sequence corresponding to sequence number 4307; (b) a gRNA core capable of complexing with a Cas9 protein, and (c) an extension arm comprising: (i) an editing template at least 67 nucleotides in length and comprising at its 3′ end a sequence corresponding to any one of sequence numbers 4331-4340, and (ii) a prime binding site (PBS) comprising at its 5′ end a sequence corresponding to sequence number 4314. The PEgRNA spacer can be, for example, 16-22 nucleotides in length and can comprise the sequence corresponding to any one of sequence numbers 4307-4313. In some embodiments, the PEgRNA spacer comprises sequence number 4311. The PEgRNA spacers in Table 17 are annotated with their PAM sequence(s), enabling the selection of an appropriate Cas9 protein. The editing template can be referred to as a reverse transcription template (RTT). The editing template can encode wildtype ATP7B gene sequence. For example, the editing template can comprise at its 3′ end the sequence corresponding to sequence number 4336, 4348, 4356, 4368, 4373, 4383, 4398, 4405, 4411, 4428, 4437, 4442, 4456, 4461, 4479, 4490, 4496, 4502, 4514, 4527, 4531, 4544, 4551, 4569, 4572, 4585, 4599, 4604, 4611, 4622, 4636, 4642, 4657, or 4662. Alternatively, the editing template can encode one or more synonymous mutations relative to the wildtype ATP7B gene. The editing template can encode one or more synonymous mutations that are PAM silencing mutations and can comprise at its 3′ end the sequence corresponding to sequence number 4331, 4332, 4333, 4334, 4335, 4337, 4338, 4339, 4340, 4341, 4342, 4343, 4344, 4345, 4346, 4347, 4349, 4350, 4351, 4352, 4353, 4354, 4355, 4357, 4358, 4359, 4360, 4361, 4362, 4363, 4364, 4365, 4366, 4367, 4369, 4370, 4371, 4372, 4374, 4375, 4376, 4377, 4378, 4379, 4380, 4381, 4382, 4384, 4385, 4386, 4387, 4388, 4389, 4390, 4391, 4392, 4393, 4394, 4395, 4396, 4397, 4399, 4400, 4401, 4402, 4403, 4404, 4406, 4407, 4408, 4409, 4410, 4412, 4413, 4414, 4415, 4416, 4417, 4418, 4419, 4420, 4421, 4422, 4423, 4424, 4425, 4426, 4427, 4429, 4430, 4431, 4432, 4433, 4434, 4435, 4436, 4438, 4439, 4440, 4441, 4443, 4444, 4445, 4446, 4447, 4448, 4449, 4450, 4451, 4452, 4453, 4454, 4455, 4457, 4458, 4459, 4460, 4462, 4463, 4464, 4465, 4466, 4467, 4468, 4469, 4470, 4471, 4472, 4473, 4474, 4475, 4476, 4477, 4478, 4480, 4481, 4482, 4483, 4484, 4485, 4486, 4487, 4488, 4489, 4491, 4492, 4493, 4494, 4495, 4497, 4498, 4499, 4500, 4501, 4503, 4504, 4505, 4506, 4507, 4508, 4509, 4510, 4511, 4512, 4513, 4515, 4516, 4517, 4518, 4519, 4520, 4521, 4522, 4523, 4524, 4525, 4526, 4528, 4529, 4530, 4532, 4533, 4534, 4535, 4536, 4537, 4538, 4539, 4540, 4541, 4542, 4543, 4545, 4546, 4547, 4548, 4549, 4550, 4552, 4553, 4554, 4555, 4556, 4557, 4558, 4559, 4560, 4561, 4562, 4563, 4564, 4565, 4566, 4567, 4568, 4570, 4571, 4573, 4574, 4575, 4576, 4577, 4578, 4579, 4580, 4581, 4582, 4583, 4584, 4586, 4587, 4588, 4589, 4590, 4591, 4592, 4593, 4594, 4595, 4596, 4597, 4598, 4600, 4601, 4602, 4603, 4605, 4606, 4607, 4608, 4609, 4610, 4612, 4613, 4614, 4615, 4616, 4617, 4618, 4619, 4620, 4621, 4623, 4624, 4625, 4626, 4627, 4628, 4629, 4630, 4631, 4632, 4633, 4634, 4635, 4637, 4638, 4639, 4640, 4641, 4643, 4644, 4645, 4646, 4647, 4648, 4649, 4650, 4651, 4652, 4653, 4654, 4655, 4656, 4658, 4659, 4660, 4661, 4663, 4664, 4665, 4666, 4667, 4668, 4669, or 4670. The PBS can be, for example, 3 to 19 nucleotides in length and can comprise the sequence corresponding to any one of sequence numbers 4314-4330. In some cases, a PBS length of no more than 3 nucleotides less than the PEgRNA spacer length is chosen.

[0321] Any of the PEgRNAs of Table 17 can be used in a Prime Editing system further comprising a nick guide RNA (ngRNA). Such ngRNA can comprise a spacer comprising at its 3′ end a sequence corresponding to nucleotides 5-20 of any ngRNA spacer listed in Table 17 and a gRNA core capable of complexing with a Cas9 protein. For example, the sequence in the spacer of the ngRNA can comprise nucleotides 5-20, 4-20, 3-20, 2-20, or 1-20 of sequence number 61, 62, 64, 65, 68, 70, 72, 76, 77, 78, 79, 81, 84, 85, 90, 91, 92, 93, 95, 96, 97, 98, 99, 189, 293, 294, 378, 733, 4175, or 4671. In some embodiments, the spacer of the ngRNA is a ngRNA spacer listed in Table 17. The ngRNA spacers in Table 17 are annotated with their PAM sequences, enabling selection of an appropriate Cas9 protein. It can be advantageous to select a ngRNA spacer that has a PAM sequence compatible with the Cas9 protein used in the Prime Editor, thus avoiding the need to use two different Cas9 proteins. The ngRNA is capable of directing a complexed Cas9 protein to bind the edit strand of the ATP7B gene; thus, a complexed Cas9 nickase containing a nuclease inactivating mutation in the HNH domain will nick the non-edit strand. A PE3 ngRNA spacer has perfect complementarity to the edit strand both pre- and post-edit; a PE3b ngRNA spacer has perfect complementarity to the edit strand post-edit; and a PE3* spacer has perfect complementarity to the edit strand post-edit with a PEgRNA containing an edit template encoding a PAM silencing mutation. Because some PAMs can be silenced by more than 1 synonymous mutation, edit templates (RTTs) encoding a PAM silencing mutation and ngRNA spacers having 100% complementary with the portion of the edit strand containing the encoded PAM silencing mutation are coded with a number following the asterisk (*). Exemplary ngRNA provided in Table 17 can comprise a sequence corresponding to sequence number 100, 101, 102, 103, 104, 105, 107, 108, 109, 110, 112, 113, 114, 117, or 118.

[0322] Table 18 provides Prime Editing guide RNAs (PEgRNAs) that can be used with any Prime Editor containing a Cas9 protein capable of recognizing a GG or GGA PAM sequence. The PEgRNAs of Table 18 can also be used in Prime Editing systems further comprising a nick guide RNA (ngRNA). Such PEgRNAs and Prime Editing systems can be used, for example, to correct an R778L mutation in ATP7B.

[0323] The PEgRNAs exemplified in Table 18 comprise: (a) a spacer comprising at its 3′ end a sequence corresponding to sequence number 4672; (b) a gRNA core capable of complexing with a Cas9 protein, and (c) an extension arm comprising: (i) an editing template at least 64 nucleotides in length and comprising at its 3′ end a sequence corresponding to any one of sequence numbers 4696-4720, and (ii) a prime binding site (PBS) comprising at its 5′ end a sequence corresponding to sequence number 4679. The PEgRNA spacer can be, for example, 16-22 nucleotides in length and can comprise the sequence corresponding to any one of sequence numbers 4672-4678. In some embodiments, the PEgRNA spacer comprises sequence number 4676. The PEgRNA spacers in Table 18 are annotated with their PAM sequence(s), enabling the selection of an appropriate Cas9 protein. The editing template can be referred to as a reverse transcription template (RTT). The editing template can encode wildtype ATP7B gene sequence. For example, the editing template can comprise at its 3′ end the sequence corresponding to sequence number 4698, 4728, 4762, 4775, 4799, 4827, 4851, 4879, 4901, 4933, 4949, 4982, 5004, 5042, 5056, 5077, 5100, 5134, 5155, 5180, 5199, 5228, 5262, 5275, 5302, 5321, 5365, 5382, 5415, 5430, 5456, 5486, 5500, 5529, 5557, 5586, or 5609. Alternatively, the editing template can encode one or more synonymous mutations relative to the wildtype ATP7B gene. The editing template can encode one or more synonymous mutations that are PAM silencing mutations and can comprise at its 3′ end the sequence corresponding to sequence number 4696, 4697, 4699, 4700, 4701, 4702, 4703, 4704, 4705, 4706, 4707, 4708, 4709, 4710, 4711, 4712, 4713, 4714, 4715, 4716, 4717, 4718, 4719, 4720, 4721, 4722, 4723, 4724, 4725, 4726, 4727, 4729, 4730, 4731, 4732, 4733, 4734, 4735, 4736, 4737, 4738, 4739, 4740, 4741, 4742, 4743, 4744, 4745, 4746, 4747, 4748, 4749, 4750, 4751, 4752, 4753, 4754, 4755, 4756, 4757, 4758, 4759, 4760, 4761, 4763, 4764, 4765, 4766, 4767, 4768, 4769, 4770, 4771, 4772, 4773, 4774, 4776, 4777, 4778, 4779, 4780, 4781, 4782, 4783, 4784, 4785, 4786, 4787, 4788, 4789, 4790, 4791, 4792, 4793, 4794, 4795, 4796, 4797, 4798, 4800, 4801, 4802, 4803, 4804, 4805, 4806, 4807, 4808, 4809, 4810, 4811, 4812, 4813, 4814, 4815, 4816, 4817, 4818, 4819, 4820, 4821, 4822, 4823, 4824, 4825, 4826, 4828, 4829, 4830, 4831, 4832, 4833, 4834, 4835, 4836, 4837, 4838, 4839, 4840, 4841, 4842, 4843, 4844, 4845, 4846, 4847, 4848, 4849, 4850, 4852, 4853, 4854, 4855, 4856, 4857, 4858, 4859, 4860, 4861, 4862, 4863, 4864, 4865, 4866, 4867, 4868, 4869, 4870, 4871, 4872, 4873, 4874, 4875, 4876, 4877, 4878, 4880, 4881, 4882, 4883, 4884, 4885, 4886, 4887, 4888, 4889, 4890, 4891, 4892, 4893, 4894, 4895, 4896, 4897, 4898, 4899, 4900, 4902, 4903, 4904, 4905, 4906, 4907, 4908, 4909, 4910, 4911, 4912, 4913, 4914, 4915, 4916, 4917, 4918, 4919, 4920, 4921, 4922, 4923, 4924, 4925, 4926, 4927, 4928, 4929, 4930, 4931, 4932, 4934, 4935, 4936, 4937, 4938, 4939, 4940, 4941, 4942, 4943, 4944, 4945, 4946, 4947, 4948, 4950, 4951, 4952, 4953, 4954, 4955, 4956, 4957, 4958, 4959, 4960, 4961, 4962, 4963, 4964, 4965, 4966, 4967, 4968, 4969, 4970, 4971, 4972, 4973, 4974, 4975, 4976, 4977, 4978, 4979, 4980, 4981, 4983, 4984, 4985, 4986, 4987, 4988, 4989, 4990, 4991, 4992, 4993, 4994, 4995, 4996, 4997, 4998, 4999, 5000, 5001, 5002, 5003, 5005, 5006, 5007, 5008, 5009, 5010, 5011, 5012, 5013, 5014, 5015, 5016, 5017, 5018, 5019, 5020, 5021, 5022, 5023, 5024, 5025, 5026, 5027, 5028, 5029, 5030, 5031, 5032, 5033, 5034, 5035, 5036, 5037, 5038, 5039, 5040, 5041, 5043, 5044, 5045, 5046, 5047, 5048, 5049, 5050, 5051, 5052, 5053, 5054, 5055, 5057, 5058, 5059, 5060, 5061, 5062, 5063, 5064, 5065, 5066, 5067, 5068, 5069, 5070, 5071, 5072, 5073, 5074, 5075, 5076, 5078, 5079, 5080, 5081, 5082, 5083, 5084, 5085, 5086, 5087, 5088, 5089, 5090, 5091, 5092, 5093, 5094, 5095, 5096, 5097, 5098, 5099, 5101, 5102, 5103, 5104, 5105, 5106, 5107, 5108, 5109, 5110, 5111, 5112, 5113, 5114, 5115, 5116, 5117, 5118, 5119, 5120, 5121, 5122, 5123, 5124, 5125, 5126, 5127, 5128, 5129, 5130, 5131, 5132, 5133, 5135, 5136, 5137, 5138, 5139, 5140, 5141, 5142, 5143, 5144, 5145, 5146, 5147, 5148, 5149, 5150, 5151, 5152, 5153, 5154, 5156, 5157, 5158, 5159, 5160, 5161, 5162, 5163, 5164, 5165, 5166, 5167, 5168, 5169, 5170, 5171, 5172, 5173, 5174, 5175, 5176, 5177, 5178, 5179, 5181, 5182, 5183, 5184, 5185, 5186, 5187, 5188, 5189, 5190, 5191, 5192, 5193, 5194, 5195, 5196, 5197, 5198, 5200, 5201, 5202, 5203, 5204, 5205, 5206, 5207, 5208, 5209, 5210, 5211, 5212, 5213, 5214, 5215, 5216, 5217, 5218, 5219, 5220, 5221, 5222, 5223, 5224, 5225, 5226, 5227, 5229, 5230, 5231, 5232, 5233, 5234, 5235, 5236, 5237, 5238, 5239, 5240, 5241, 5242, 5243, 5244, 5245, 5246, 5247, 5248, 5249, 5250, 5251, 5252, 5253, 5254, 5255, 5256, 5257, 5258, 5259, 5260, 5261, 5263, 5264, 5265, 5266, 5267, 5268, 5269, 5270, 5271, 5272, 5273, 5274, 5276, 5277, 5278, 5279, 5280, 5281, 5282, 5283, 5284, 5285, 5286, 5287, 5288, 5289, 5290, 5291, 5292, 5293, 5294, 5295, 5296, 5297, 5298, 5299, 5300, 5301, 5303, 5304, 5305, 5306, 5307, 5308, 5309, 5310, 5311, 5312, 5313, 5314, 5315, 5316, 5317, 5318, 5319, 5320, 5322, 5323, 5324, 5325, 5326, 5327, 5328, 5329, 5330, 5331, 5332, 5333, 5334, 5335, 5336, 5337, 5338, 5339, 5340, 5341, 5342, 5343, 5344, 5345, 5346, 5347, 5348, 5349, 5350, 5351, 5352, 5353, 5354, 5355, 5356, 5357, 5358, 5359, 5360, 5361, 5362, 5363, 5364, 5366, 5367, 5368, 5369, 5370, 5371, 5372, 5373, 5374, 5375, 5376, 5377, 5378, 5379, 5380, 5381, 5383, 5384, 5385, 5386, 5387, 5388, 5389, 5390, 5391, 5392, 5393, 5394, 5395, 5396, 5397, 5398, 5399, 5400, 5401, 5402, 5403, 5404, 5405, 5406, 5407, 5408, 5409, 5410, 5411, 5412, 5413, 5414, 5416, 5417, 5418, 5419, 5420, 5421, 5422, 5423, 5424, 5425, 5426, 5427, 5428, 5429, 5431, 5432, 5433, 5434, 5435, 5436, 5437, 5438, 5439, 5440, 5441, 5442, 5443, 5444, 5445, 5446, 5447, 5448, 5449, 5450, 5451, 5452, 5453, 5454, 5455, 5457, 5458, 5459, 5460, 5461, 5462, 5463, 5464, 5465, 5466, 5467, 5468, 5469, 5470, 5471, 5472, 5473, 5474, 5475, 5476, 5477, 5478, 5479, 5480, 5481, 5482, 5483, 5484, 5485, 5487, 5488, 5489, 5490, 5491, 5492, 5493, 5494, 5495, 5496, 5497, 5498, 5499, 5501, 5502, 5503, 5504, 5505, 5506, 5507, 5508, 5509, 5510, 5511, 5512, 5513, 5514, 5515, 5516, 5517, 5518, 5519, 5520, 5521, 5522, 5523, 5524, 5525, 5526, 5527, 5528, 5530, 5531, 5532, 5533, 5534, 5535, 5536, 5537, 5538, 5539, 5540, 5541, 5542, 5543, 5544, 5545, 5546, 5547, 5548, 5549, 5550, 5551, 5552, 5553, 5554, 5555, 5556, 5558, 5559, 5560, 5561, 5562, 5563, 5564, 5565, 5566, 5567, 5568, 5569, 5570, 5571, 5572, 5573, 5574, 5575, 5576, 5577, 5578, 5579, 5580, 5581, 5582, 5583, 5584, 5585, 5587, 5588, 5589, 5590, 5591, 5592, 5593, 5594, 5595, 5596, 5597, 5598, 5599, 5600, 5601, 5602, 5603, 5604, 5605, 5606, 5607, 5608, 5610, 5611, 5612, 5613, 5614, 5615, 5616, 5617, 5618, 5619, or 5620. The PBS can be, for example, 3 to 19 nucleotides in length and can comprise the sequence corresponding to any one of sequence numbers 4679-4695. In some cases, a PBS length of no more than 3 nucleotides less than the PEgRNA spacer length is chosen.

[0324] Any of the PEgRNAs of Table 18 can be used in a Prime Editing system further comprising a nick guide RNA (ngRNA). Such ngRNA can comprise a spacer comprising at its 3′ end a sequence corresponding to nucleotides 5-20 of any ngRNA spacer listed in Table 18 and a gRNA core capable of complexing with a Cas9 protein. For example, the sequence in the spacer of the ngRNA can comprise nucleotides 5-20, 4-20, 3-20, 2-20, or 1-20 of sequence number 61, 62, 64, 65, 68, 70, 72, 76, 77, 78, 79, 81, 84, 85, 90, 91, 92, 93, 95, 96, 97, 98, 99, 189, 293, 294, 378, 732, 733, 4175, 5621, 5622, 5623, or 5624. In some embodiments, the spacer of the ngRNA is a ngRNA spacer listed in Table 18. The ngRNA spacers in Table 18 are annotated with their PAM sequences, enabling selection of an appropriate Cas9 protein. It can be advantageous to select a ngRNA spacer that has a PAM sequence compatible with the Cas9 protein used in the Prime Editor, thus avoiding the need to use two different Cas9 proteins. The ngRNA is capable of directing a complexed Cas9 protein to bind the edit strand of the ATP7B gene; thus, a complexed Cas9 nickase containing a nuclease inactivating mutation in the HNH domain will nick the non-edit strand. A PE3 ngRNA spacer has perfect complementarity to the edit strand both pre- and post-edit; a PE3b ngRNA spacer has perfect complementarity to the edit strand post-edit; and a PE3* spacer has perfect complementarity to the edit strand post-edit with a PEgRNA containing an edit template encoding a PAM silencing mutation. Because some PAMs can be silenced by more than 1 synonymous mutation, edit templates (RTTs) encoding a PAM silencing mutation and ngRNA spacers having 100% complementary with the portion of the edit strand containing the encoded PAM silencing mutation are coded with a number following the asterisk (*). Exemplary ngRNA provided in Table 18 can comprise a sequence corresponding to sequence number 100, 101, 102, 103, 104, 105, 107, 108, 109, 110, 112, 113, 114, 117, or 118.

[0325] Table 19 provides Prime Editing guide RNAs (PEgRNAs) that can be used with any Prime Editor containing a Cas9 protein capable of recognizing a TG or TGA PAM sequence. The PEgRNAs of Table 19 can also be used in Prime Editing systems further comprising a nick guide RNA (ngRNA). Such PEgRNAs and Prime Editing systems can be used, for example, to correct an R778L mutation in ATP7B.

[0326] The PEgRNAs exemplified in Table 19 comprise: (a) a spacer comprising at its 3′ end a sequence corresponding to sequence number 5625; (b) a gRNA core capable of complexing with a Cas9 protein, and (c) an extension arm comprising: (i) an editing template at least 55 nucleotides in length and comprising at its 3′ end a sequence corresponding to any one of sequence numbers 5649-5652, and (ii) a prime binding site (PBS) comprising at its 5′ end a sequence corresponding to sequence number 5632. The PEgRNA spacer can be, for example, 16-22 nucleotides in length and can comprise the sequence corresponding to any one of sequence numbers 5625-5631. In some embodiments, the PEgRNA spacer comprises sequence number 5629. The PEgRNA spacers in Table 19 are annotated with their PAM sequence(s), enabling the selection of an appropriate Cas9 protein. The editing template can be referred to as a reverse transcription template (RTT). The editing template can encode wildtype ATP7B gene sequence. For example, the editing template can comprise at its 3′ end the sequence corresponding to sequence number 5650, 5655, 5657, 5664, 5667, 5669, 5676, 5679, 5682, 5687, 5692, 5695, 5700, 5703, 5707, 5711, 5716, 5717, 5721, 5728, 5730, 5734, 5737, 5741, 5747, 5751, 5756, 5757, 5763, 5768, 5771, 5776, 5777, 5783, 5785, 5790, 5793, 5800, 5802, 5807, 5809, 5815, 5818, 5823, 5827, or 5830. Alternatively, the editing template can encode one or more synonymous mutations relative to the wildtype ATP7B gene. The editing template can encode one or more synonymous mutations that are PAM silencing mutations and can comprise at its 3′ end the sequence corresponding to sequence number 5649, 5651, 5652, 5653, 5654, 5656, 5658, 5659, 5660, 5661, 5662, 5663, 5665, 5666, 5668, 5670, 5671, 5672, 5673, 5674, 5675, 5677, 5678, 5680, 5681, 5683, 5684, 5685, 5686, 5688, 5689, 5690, 5691, 5693, 5694, 5696, 5697, 5698, 5699, 5701, 5702, 5704, 5705, 5706, 5708, 5709, 5710, 5712, 5713, 5714, 5715, 5718, 5719, 5720, 5722, 5723, 5724, 5725, 5726, 5727, 5729, 5731, 5732, 5733, 5735, 5736, 5738, 5739, 5740, 5742, 5743, 5744, 5745, 5746, 5748, 5749, 5750, 5752, 5753, 5754, 5755, 5758, 5759, 5760, 5761, 5762, 5764, 5765, 5766, 5767, 5769, 5770, 5772, 5773, 5774, 5775, 5778, 5779, 5780, 5781, 5782, 5784, 5786, 5787, 5788, 5789, 5791, 5792, 5794, 5795, 5796, 5797, 5798, 5799, 5801, 5803, 5804, 5805, 5806, 5808, 5810, 5811, 5812, 5813, 5814, 5816, 5817, 5819, 5820, 5821, 5822, 5824, 5825, 5826, 5828, 5829, 5831, or 5832. The PBS can be, for example, 3 to 19 nucleotides in length and can comprise the sequence corresponding to any one of sequence numbers 5632-5648. In some cases, a PBS length of no more than 3 nucleotides less than the PEgRNA spacer length is chosen.

[0327] Any of the PEgRNAs of Table 19 can be used in a Prime Editing system further comprising a nick guide RNA (ngRNA). Such ngRNA can comprise a spacer comprising at its 3′ end a sequence corresponding to nucleotides 5-20 of any ngRNA spacer listed in Table 19 and a gRNA core capable of complexing with a Cas9 protein. For example, the sequence in the spacer of the ngRNA can comprise nucleotides 5-20, 4-20, 3-20, 2-20, or 1-20 of sequence number 61, 62, 64, 65, 68, 70, 72, 76, 77, 78, 79, 81, 84, 85, 91, 92, 93, 95, 96, 97, 98, 99, 189, 293, 294, 378, 732, 733, 1213, 1229, 4175, 5833, 5834, 5835, 5836, 5837, 5838, 5839, 5840, or 5841. In some embodiments, the spacer of the ngRNA is a ngRNA spacer listed in Table 19. The ngRNA spacers in Table 19 are annotated with their PAM sequences, enabling selection of an appropriate Cas9 protein. It can be advantageous to select a ngRNA spacer that has a PAM sequence compatible with the Cas9 protein used in the Prime Editor, thus avoiding the need to use two different Cas9 proteins. The ngRNA is capable of directing a complexed Cas9 protein to bind the edit strand of the ATP7B gene; thus, a complexed Cas9 nickase containing a nuclease inactivating mutation in the HNH domain will nick the non-edit strand. A PE3 ngRNA spacer has perfect complementarity to the edit strand both pre- and post-edit; a PE3b ngRNA spacer has perfect complementarity to the edit strand post-edit; and a PE3* spacer has perfect complementarity to the edit strand post-edit with a PEgRNA containing an edit template encoding a PAM silencing mutation. Because some PAMs can be silenced by more than 1 synonymous mutation, edit templates (RTTs) encoding a PAM silencing mutation and ngRNA spacers having 100% complementary with the portion of the edit strand containing the encoded PAM silencing mutation are coded with a number following the asterisk (*). Exemplary ngRNA provided in Table 19 can comprise a sequence corresponding to sequence number 100, 101, 102, 103, 104, 105, 107, 108, 109, 110, 112, 113, 114, 117, or 118.

[0328] Table 20 provides Prime Editing guide RNAs (PEgRNAs) that can be used with any Prime Editor containing a Cas9 protein capable of recognizing a CG or CGA PAM sequence. The PEgRNAs of Table 20 can also be used in Prime Editing systems further comprising a nick guide RNA (ngRNA). Such PEgRNAs and Prime Editing systems can be used, for example, to correct an R778L mutation in ATP7B.

[0329] The PEgRNAs exemplified in Table 20 comprise: (a) a spacer comprising at its 3′ end a sequence corresponding to sequence number 5842; (b) a gRNA core capable of complexing with a Cas9 protein, and (c) an extension arm comprising: (i) an editing template at least 45 nucleotides in length and comprising at its 3′ end a sequence corresponding to sequence number 5866, and (ii) a prime binding site (PBS) comprising at its 5′ end a sequence corresponding to sequence number 5849. The PEgRNA spacer can be, for example, 16-22 nucleotides in length and can comprise the sequence corresponding to any one of sequence numbers 5842-5848. In some embodiments, the PEgRNA spacer comprises sequence number 5846. The PEgRNA spacers in Table 20 are annotated with their PAM sequence(s), enabling the selection of an appropriate Cas9 protein. The editing template can be referred to as a reverse transcription template (RTT). The editing template can encode wildtype ATP7B gene sequence. For example, the editing template can comprise at its 3′ end the sequence corresponding to any one of sequence numbers 5866-5921. Alternatively, the editing template can encode one or more synonymous mutations relative to the wildtype ATP7B gene. The PBS can be, for example, 3 to 19 nucleotides in length and can comprise the sequence corresponding to any one of sequence numbers 5849-5865. In some cases, a PBS length of no more than 3 nucleotides less than the PEgRNA spacer length is chosen.

[0330] Any of the PEgRNAs of Table 20 can be used in a Prime Editing system further comprising a nick guide RNA (ngRNA). Such ngRNA can comprise a spacer comprising at its 3′ end a sequence corresponding to nucleotides 5-20 of any ngRNA spacer listed in Table 20 and a gRNA core capable of complexing with a Cas9 protein. For example, the sequence in the spacer of the ngRNA can comprise nucleotides 5-20, 4-20, 3-20, 2-20, or 1-20 of sequence number 62, 64, 65, 68, 70, 72, 76, 78, 79, 81, 84, 85, 91, 92, 93, 95, 97, 98, 99, 189, 293, 294, 378, 732, 733, 1213, 1228, 1229, or 4175. In some embodiments, the spacer of the ngRNA is a ngRNA spacer listed in Table 20. The ngRNA spacers in Table 20 are annotated with their PAM sequences, enabling selection of an appropriate Cas9 protein. It can be advantageous to select a ngRNA spacer that has a PAM sequence compatible with the Cas9 protein used in the Prime Editor, thus avoiding the need to use two different Cas9 proteins. The ngRNA is capable of directing a complexed Cas9 protein to bind the edit strand of the ATP7B gene; thus, a complexed Cas9 nickase containing a nuclease inactivating mutation in the HNH domain will nick the non-edit strand. A PE3 ngRNA spacer has perfect complementarity to the edit strand both pre- and post-edit; a PE3b ngRNA spacer has perfect complementarity to the edit strand post-edit; and a PE3* spacer has perfect complementarity to the edit strand post-edit with a PEgRNA containing an edit template encoding a PAM silencing mutation. Because some PAMs can be silenced by more than 1 synonymous mutation, edit templates (RTTs) encoding a PAM silencing mutation and ngRNA spacers having 100% complementary with the portion of the edit strand containing the encoded PAM silencing mutation are coded with a number following the asterisk (*). Exemplary ngRNA provided in Table 20 can comprise a sequence corresponding to sequence number 100, 101, 103, 104, 105, 107, 109, 110, 112, 113, 114, 117, or 118.

[0331] Table 21 provides Prime Editing guide RNAs (PEgRNAs) that can be used with any Prime Editor containing a Cas9 protein capable of recognizing a AG or AGA PAM sequence. The PEgRNAs of Table 21 can also be used in Prime Editing systems further comprising a nick guide RNA (ngRNA). Such PEgRNAs and Prime Editing systems can be used, for example, to correct an R778L mutation in ATP7B.

[0332] The PEgRNAs exemplified in Table 21 comprise: (a) a spacer comprising at its 3′ end a sequence corresponding to sequence number 5922; (b) a gRNA core capable of complexing with a Cas9 protein, and (c) an extension arm comprising: (i) an editing template at least 88 nucleotides in length and comprising at its 3′ end a sequence corresponding to sequence number 5946, and (ii) a prime binding site (PBS) comprising at its 5′ end a sequence corresponding to sequence number 5929. The PEgRNA spacer can be, for example, 16-22 nucleotides in length and can comprise the sequence corresponding to any one of sequence numbers 5922-5928. In some embodiments, the PEgRNA spacer comprises sequence number 5926. The PEgRNA spacers in Table 21 are annotated with their PAM sequence(s), enabling the selection of an appropriate Cas9 protein. The editing template can be referred to as a reverse transcription template (RTT). The editing template can encode wildtype ATP7B gene sequence. For example, the editing template can comprise at its 3′ end the sequence corresponding to any one of sequence numbers 5946-5958. Alternatively, the editing template can encode one or more synonymous mutations relative to the wildtype ATP7B gene. The PBS can be, for example, 3 to 19 nucleotides in length and can comprise the sequence corresponding to any one of sequence numbers 5929-5945. In some cases, a PBS length of no more than 3 nucleotides less than the PEgRNA spacer length is chosen.

[0333] Any of the PEgRNAs of Table 21 can be used in a Prime Editing system further comprising a nick guide RNA (ngRNA). Such ngRNA can comprise a spacer comprising at its 3′ end a sequence corresponding to nucleotides 5-20 of any ngRNA spacer listed in Table 21 and a gRNA core capable of complexing with a Cas9 protein. For example, the sequence in the spacer of the ngRNA can comprise nucleotides 5-20, 4-20, 3-20, 2-20, or 1-20 of sequence number 1989, 1990, 1991, 1992, 1993, 1994, 1995, 1996, 1997, 1998, 1999, 2000, 2001, 2002, 2003, 2004, 2005, 2006, 2008, 2056, 2057, 2059, or 4175. In some embodiments, the spacer of the ngRNA is a ngRNA spacer listed in Table 21. The ngRNA spacers in Table 21 are annotated with their PAM sequences, enabling selection of an appropriate Cas9 protein. It can be advantageous to select a ngRNA spacer that has a PAM sequence compatible with the Cas9 protein used in the Prime Editor, thus avoiding the need to use two different Cas9 proteins. The ngRNA is capable of directing a complexed Cas9 protein to bind the edit strand of the ATP7B gene; thus, a complexed Cas9 nickase containing a nuclease inactivating mutation in the HNH domain will nick the non-edit strand. A PE3 ngRNA spacer has perfect complementarity to the edit strand both pre- and post-edit; a PE3b ngRNA spacer has perfect complementarity to the edit strand post-edit; and a PE3* spacer has perfect complementarity to the edit strand post-edit with a PEgRNA containing an edit template encoding a PAM silencing mutation. Because some PAMs can be silenced by more than 1 synonymous mutation, edit templates (RTTs) encoding a PAM silencing mutation and ngRNA spacers having 100% complementary with the portion of the edit strand containing the encoded PAM silencing mutation are coded with a number following the asterisk (*). Exemplary ngRNA provided in Table 21 can comprise a sequence corresponding to sequence number 2010, 2011, 2012, 2013, 2014, 2015, 2016, 2060, 2061, or 2062.

[0334] Table 22 provides Prime Editing guide RNAs (PEgRNAs) that can be used with any Prime Editor containing a Cas9 protein capable of recognizing a GG, GGA, or GGAAGT PAM sequence. The PEgRNAs of Table 22 can also be used in Prime Editing systems further comprising a nick guide RNA (ngRNA). Such PEgRNAs and Prime Editing systems can be used, for example, to correct an R778L mutation in ATP7B.

[0335] The PEgRNAs exemplified in Table 22 comprise: (a) a spacer comprising at its 3′ end a sequence corresponding to sequence number 5959; (b) a gRNA core capable of complexing with a Cas9 protein, and (c) an extension arm comprising: (i) an editing template at least 85 nucleotides in length and comprising at its 3′ end a sequence corresponding to sequence number 5983, and (ii) a prime binding site (PBS) comprising at its 5′ end a sequence corresponding to sequence number 5966. The PEgRNA spacer can be, for example, 16-22 nucleotides in length and can comprise the sequence corresponding to any one of sequence numbers 5959-5965. In some embodiments, the PEgRNA spacer comprises sequence number 5963. The PEgRNA spacers in Table 22 are annotated with their PAM sequence(s), enabling the selection of an appropriate Cas9 protein. The editing template can be referred to as a reverse transcription template (RTT). The editing template can encode wildtype ATP7B gene sequence. For example, the editing template can comprise at its 3′ end the sequence corresponding to any one of sequence numbers 5983-5998. Alternatively, the editing template can encode one or more synonymous mutations relative to the wildtype ATP7B gene. The PBS can be, for example, 3 to 19 nucleotides in length and can comprise the sequence corresponding to any one of sequence numbers 5966-5982. In some cases, a PBS length of no more than 3 nucleotides less than the PEgRNA spacer length is chosen.

[0336] Any of the PEgRNAs of Table 22 can be used in a Prime Editing system further comprising a nick guide RNA (ngRNA). Such ngRNA can comprise a spacer comprising at its 3′ end a sequence corresponding to nucleotides 5-20 of any ngRNA spacer listed in Table 22 and a gRNA core capable of complexing with a Cas9 protein. For example, the sequence in the spacer of the ngRNA can comprise nucleotides 5-20, 4-20, 3-20, 2-20, or 1-20 of sequence number 1989, 1990, 1991, 1992, 1993, 1994, 1995, 1996, 1997, 1998, 1999, 2000, 2001, 2002, 2003, 2004, 2005, 2006, 2008, 2056, 2057, 2058, 2059, 4175, 5999, 6000, 6001, or 6002. In some embodiments, the spacer of the ngRNA is a ngRNA spacer listed in Table 22. The ngRNA spacers in Table 22 are annotated with their PAM sequences, enabling selection of an appropriate Cas9 protein. It can be advantageous to select a ngRNA spacer that has a PAM sequence compatible with the Cas9 protein used in the Prime Editor, thus avoiding the need to use two different Cas9 proteins. The ngRNA is capable of directing a complexed Cas9 protein to bind the edit strand of the ATP7B gene; thus, a complexed Cas9 nickase containing a nuclease inactivating mutation in the HNH domain will nick the non-edit strand. A PE3 ngRNA spacer has perfect complementarity to the edit strand both pre- and post-edit; a PE3b ngRNA spacer has perfect complementarity to the edit strand post-edit; and a PE3* spacer has perfect complementarity to the edit strand post-edit with a PEgRNA containing an edit template encoding a PAM silencing mutation. Because some PAMs can be silenced by more than 1 synonymous mutation, edit templates (RTTs) encoding a PAM silencing mutation and ngRNA spacers having 100% complementary with the portion of the edit strand containing the encoded PAM silencing mutation are coded with a number following the asterisk (*). Exemplary ngRNA provided in Table 22 can comprise a sequence corresponding to sequence number 2010, 2011, 2012, 2013, 2014, 2015, 2016, 2060, 2061, or 2062.

[0337] Table 23 provides Prime Editing guide RNAs (PEgRNAs) that can be used with any Prime Editor containing a Cas9 protein capable of recognizing a TG, TGA, or TGAGAT PAM sequence. The PEgRNAs of Table 23 can also be used in Prime Editing systems further comprising a nick guide RNA (ngRNA). Such PEgRNAs and Prime Editing systems can be used, for example, to correct an R778L mutation in ATP7B.

[0338] The PEgRNAs exemplified in Table 23 comprise: (a) a spacer comprising at its 3′ end a sequence corresponding to sequence number 6003; (b) a gRNA core capable of complexing with a Cas9 protein, and (c) an extension arm comprising: (i) an editing template at least 80 nucleotides in length and comprising at its 3′ end a sequence corresponding to sequence number 6026, and (ii) a prime binding site (PBS) comprising at its 5′ end a sequence corresponding to sequence number 4314. The PEgRNA spacer can be, for example, 16-22 nucleotides in length and can comprise the sequence corresponding to any one of sequence numbers 6003-6009. In some embodiments, the PEgRNA spacer comprises sequence number 6007. The PEgRNA spacers in Table 23 are annotated with their PAM sequence(s), enabling the selection of an appropriate Cas9 protein. The editing template can be referred to as a reverse transcription template (RTT). The editing template can encode wildtype ATP7B gene sequence. For example, the editing template can comprise at its 3′ end the sequence corresponding to any one of sequence numbers 6026-6046. Alternatively, the editing template can encode one or more synonymous mutations relative to the wildtype ATP7B gene. The PBS can be, for example, 3 to 19 nucleotides in length and can comprise the sequence corresponding to sequence number 4314, 6010, 6011, 6012, 6013, 6014, 6015, 6016, 6017, 6018, 6019, 6020, 6021, 6022, 6023, 6024, or 6025. In some cases, a PBS length of no more than 3 nucleotides less than the PEgRNA spacer length is chosen.

[0339] Any of the PEgRNAs of Table 23 can be used in a Prime Editing system further comprising a nick guide RNA (ngRNA). Such ngRNA can comprise a spacer comprising at its 3′ end a sequence corresponding to nucleotides 5-20 of any ngRNA spacer listed in Table 23 and a gRNA core capable of complexing with a Cas9 protein. For example, the sequence in the spacer of the ngRNA can comprise nucleotides 5-20, 4-20, 3-20, 2-20, or 1-20 of sequence number 1989, 1990, 1992, 1993, 1994, 1995, 1996, 1997, 1998, 1999, 2000, 2001, 2002, 2003, 2004, 2005, 2006, 2008, 2056, 2057, 2058, 2059, 4175, 5999, 6000, 6001, or 6002. In some embodiments, the spacer of the ngRNA is a ngRNA spacer listed in Table 23. The ngRNA spacers in Table 23 are annotated with their PAM sequences, enabling selection of an appropriate Cas9 protein. It can be advantageous to select a ngRNA spacer that has a PAM sequence compatible with the Cas9 protein used in the Prime Editor, thus avoiding the need to use two different Cas9 proteins. The ngRNA is capable of directing a complexed Cas9 protein to bind the edit strand of the ATP7B gene; thus, a complexed Cas9 nickase containing a nuclease inactivating mutation in the HNH domain will nick the non-edit strand. A PE3 ngRNA spacer has perfect complementarity to the edit strand both pre- and post-edit; a PE3b ngRNA spacer has perfect complementarity to the edit strand post-edit; and a PE3* spacer has perfect complementarity to the edit strand post-edit with a PEgRNA containing an edit template encoding a PAM silencing mutation. Because some PAMs can be silenced by more than 1 synonymous mutation, edit templates (RTTs) encoding a PAM silencing mutation and ngRNA spacers having 100% complementary with the portion of the edit strand containing the encoded PAM silencing mutation are coded with a number following the asterisk (*). Exemplary ngRNA provided in Table 23 can comprise a sequence corresponding to sequence number 2010, 2011, 2012, 2013, 2014, 2015, 2016, 2060, 2061, or 2062.

[0340] Table 24 provides Prime Editing guide RNAs (PEgRNAs) that can be used with any Prime Editor containing a Cas9 protein capable of recognizing a AG or AGA PAM sequence. The PEgRNAs of Table 24 can also be used in Prime Editing systems further comprising a nick guide RNA (ngRNA). Such PEgRNAs and Prime Editing systems can be used, for example, to correct an R778L mutation in ATP7B.

[0341] The PEgRNAs exemplified in Table 24 comprise: (a) a spacer comprising at its 3′ end a sequence corresponding to sequence number 6047; (b) a gRNA core capable of complexing with a Cas9 protein, and (c) an extension arm comprising: (i) an editing template at least 78 nucleotides in length and comprising at its 3′ end a sequence corresponding to sequence number 6070, and (ii) a prime binding site (PBS) comprising at its 5′ end a sequence corresponding to sequence number 4258. The PEgRNA spacer can be, for example, 16-22 nucleotides in length and can comprise the sequence corresponding to any one of sequence numbers 6047-6053. In some embodiments, the PEgRNA spacer comprises sequence number 6051. The PEgRNA spacers in Table 24 are annotated with their PAM sequence(s), enabling the selection of an appropriate Cas9 protein. The editing template can be referred to as a reverse transcription template (RTT). The editing template can encode wildtype ATP7B gene sequence. For example, the editing template can comprise at its 3′ end the sequence corresponding to any one of sequence numbers 6070-6092. Alternatively, the editing template can encode one or more synonymous mutations relative to the wildtype ATP7B gene. The PBS can be, for example, 3 to 19 nucleotides in length and can comprise the sequence corresponding to sequence number 4258, 6054, 6055, 6056, 6057, 6058, 6059, 6060, 6061, 6062, 6063, 6064, 6065, 6066, 6067, 6068, or 6069. In some cases, a PBS length of no more than 3 nucleotides less than the PEgRNA spacer length is chosen.

[0342] Any of the PEgRNAs of Table 24 can be used in a Prime Editing system further comprising a nick guide RNA (ngRNA). Such ngRNA can comprise a spacer comprising at its 3′ end a sequence corresponding to nucleotides 5-20 of any ngRNA spacer listed in Table 24 and a gRNA core capable of complexing with a Cas9 protein. For example, the sequence in the spacer of the ngRNA can comprise nucleotides 5-20, 4-20, 3-20, 2-20, or 1-20 of sequence number 1989, 1990, 1992, 1993, 1994, 1995, 1996, 1997, 1998, 1999, 2000, 2001, 2002, 2003, 2004, 2005, 2006, 2008, 2056, 2057, 2058, 2059, 2125, or 4175. In some embodiments, the spacer of the ngRNA is a ngRNA spacer listed in Table 24. The ngRNA spacers in Table 24 are annotated with their PAM sequences, enabling selection of an appropriate Cas9 protein. It can be advantageous to select a ngRNA spacer that has a PAM sequence compatible with the Cas9 protein used in the Prime Editor, thus avoiding the need to use two different Cas9 proteins. The ngRNA is capable of directing a complexed Cas9 protein to bind the edit strand of the ATP7B gene; thus, a complexed Cas9 nickase containing a nuclease inactivating mutation in the HNH domain will nick the non-edit strand. A PE3 ngRNA spacer has perfect complementarity to the edit strand both pre- and post-edit; a PE3b ngRNA spacer has perfect complementarity to the edit strand post-edit; and a PE3* spacer has perfect complementarity to the edit strand post-edit with a PEgRNA containing an edit template encoding a PAM silencing mutation. Because some PAMs can be silenced by more than 1 synonymous mutation, edit templates (RTTs) encoding a PAM silencing mutation and ngRNA spacers having 100% complementary with the portion of the edit strand containing the encoded PAM silencing mutation are coded with a number following the asterisk (*). Exemplary ngRNA provided in Table 24 can comprise a sequence corresponding to sequence number 2010, 2011, 2012, 2013, 2014, 2015, 2016, 2060, 2061, or 2062.

[0343] Table 25 provides Prime Editing guide RNAs (PEgRNAs) that can be used with any Prime Editor containing a Cas9 protein capable of recognizing a TG or TGA PAM sequence. The PEgRNAs of Table 25 can also be used in Prime Editing systems further comprising a nick guide RNA (ngRNA). Such PEgRNAs and Prime Editing systems can be used, for example, to correct an R778L mutation in ATP7B.

[0344] The PEgRNAs exemplified in Table 25 comprise: (a) a spacer comprising at its 3′ end a sequence corresponding to sequence number 6093; (b) a gRNA core capable of complexing with a Cas9 protein, and (c) an extension arm comprising: (i) an editing template at least 66 nucleotides in length and comprising at its 3′ end a sequence corresponding to sequence number 6115, and (ii) a prime binding site (PBS) comprising at its 5′ end a sequence corresponding to sequence number 2024. The PEgRNA spacer can be, for example, 16-22 nucleotides in length and can comprise the sequence corresponding to any one of sequence numbers 6093-6099. In some embodiments, the PEgRNA spacer comprises sequence number 6097. The PEgRNA spacers in Table 25 are annotated with their PAM sequence(s), enabling the selection of an appropriate Cas9 protein. The editing template can be referred to as a reverse transcription template (RTT). The editing template can encode wildtype ATP7B gene sequence. For example, the editing template can comprise at its 3′ end the sequence corresponding to any one of sequence numbers 6115-6149. Alternatively, the editing template can encode one or more synonymous mutations relative to the wildtype ATP7B gene. The PBS can be, for example, 3 to 19 nucleotides in length and can comprise the sequence corresponding to sequence number 2024, 2025, 6100, 6101, 6102, 6103, 6104, 6105, 6106, 6107, 6108, 6109, 6110, 6111, 6112, 6113, or 6114. In some cases, a PBS length of no more than 3 nucleotides less than the PEgRNA spacer length is chosen.

[0345] Any of the PEgRNAs of Table 25 can be used in a Prime Editing system further comprising a nick guide RNA (ngRNA). Such ngRNA can comprise a spacer comprising at its 3′ end a sequence corresponding to nucleotides 5-20 of any ngRNA spacer listed in Table 25 and a gRNA core capable of complexing with a Cas9 protein. For example, the sequence in the spacer of the ngRNA can comprise nucleotides 5-20, 4-20, 3-20, 2-20, or 1-20 of sequence number 1989, 1990, 1992, 1993, 1994, 1995, 1996, 1997, 1998, 1999, 2000, 2001, 2002, 2003, 2004, 2005, 2006, 2008, 2056, 2057, 2058, 2059, 2125, 2126, 2127, or 4175. In some embodiments, the spacer of the ngRNA is a ngRNA spacer listed in Table 25. The ngRNA spacers in Table 25 are annotated with their PAM sequences, enabling selection of an appropriate Cas9 protein. It can be advantageous to select a ngRNA spacer that has a PAM sequence compatible with the Cas9 protein used in the Prime Editor, thus avoiding the need to use two different Cas9 proteins. The ngRNA is capable of directing a complexed Cas9 protein to bind the edit strand of the ATP7B gene; thus, a complexed Cas9 nickase containing a nuclease inactivating mutation in the HNH domain will nick the non-edit strand. A PE3 ngRNA spacer has perfect complementarity to the edit strand both pre- and post-edit; a PE3b ngRNA spacer has perfect complementarity to the edit strand post-edit; and a PE3* spacer has perfect complementarity to the edit strand post-edit with a PEgRNA containing an edit template encoding a PAM silencing mutation. Because some PAMs can be silenced by more than 1 synonymous mutation, edit templates (RTTs) encoding a PAM silencing mutation and ngRNA spacers having 100% complementary with the portion of the edit strand containing the encoded PAM silencing mutation are coded with a number following the asterisk (*). Exemplary ngRNA provided in Table 25 can comprise a sequence corresponding to sequence number 2010, 2011, 2012, 2013, 2014, 2015, 2016, 2060, 2061, or 2062.

[0346] Table 26 provides Prime Editing guide RNAs (PEgRNAs) that can be used with any Prime Editor containing a Cas9 protein capable of recognizing a GG or GGA PAM sequence. The PEgRNAs of Table 26 can also be used in Prime Editing systems further comprising a nick guide RNA (ngRNA). Such PEgRNAs and Prime Editing systems can be used, for example, to correct an R778L mutation in ATP7B.

[0347] The PEgRNAs exemplified in Table 26 comprise: (a) a spacer comprising at its 3′ end a sequence corresponding to sequence number 6150; (b) a gRNA core capable of complexing with a Cas9 protein, and (c) an extension arm comprising: (i) an editing template at least 62 nucleotides in length and comprising at its 3′ end a sequence corresponding to sequence number 6174, and (ii) a prime binding site (PBS) comprising at its 5′ end a sequence corresponding to sequence number 6157. The PEgRNA spacer can be, for example, 16-22 nucleotides in length and can comprise the sequence corresponding to any one of sequence numbers 6150-6156. In some embodiments, the PEgRNA spacer comprises sequence number 6154. The PEgRNA spacers in Table 26 are annotated with their PAM sequence(s), enabling the selection of an appropriate Cas9 protein. The editing template can be referred to as a reverse transcription template (RTT). The editing template can encode wildtype ATP7B gene sequence. For example, the editing template can comprise at its 3′ end the sequence corresponding to any one of sequence numbers 6174-6212. Alternatively, the editing template can encode one or more synonymous mutations relative to the wildtype ATP7B gene. The PBS can be, for example, 3 to 19 nucleotides in length and can comprise the sequence corresponding to any one of sequence numbers 6157-6173. In some cases, a PBS length of no more than 3 nucleotides less than the PEgRNA spacer length is chosen.

[0348] Any of the PEgRNAs of Table 26 can be used in a Prime Editing system further comprising a nick guide RNA (ngRNA). Such ngRNA can comprise a spacer comprising at its 3′ end a sequence corresponding to nucleotides 5-20 of any ngRNA spacer listed in Table 26 and a gRNA core capable of complexing with a Cas9 protein. For example, the sequence in the spacer of the ngRNA can comprise nucleotides 5-20, 4-20, 3-20, 2-20, or 1-20 of sequence number 1989, 1990, 1992, 1993, 1994, 1995, 1996, 1997, 1998, 1999, 2000, 2001, 2002, 2003, 2004, 2005, 2006, 2008, 2056, 2057, 2058, 2059, 2125, 2126, 2127, or 4175. In some embodiments, the spacer of the ngRNA is a ngRNA spacer listed in Table 26. The ngRNA spacers in Table 26 are annotated with their PAM sequences, enabling selection of an appropriate Cas9 protein. It can be advantageous to select a ngRNA spacer that has a PAM sequence compatible with the Cas9 protein used in the Prime Editor, thus avoiding the need to use two different Cas9 proteins. The ngRNA is capable of directing a complexed Cas9 protein to bind the edit strand of the ATP7B gene; thus, a complexed Cas9 nickase containing a nuclease inactivating mutation in the HNH domain will nick the non-edit strand. A PE3 ngRNA spacer has perfect complementarity to the edit strand both pre- and post-edit; a PE3b ngRNA spacer has perfect complementarity to the edit strand post-edit; and a PE3* spacer has perfect complementarity to the edit strand post-edit with a PEgRNA containing an edit template encoding a PAM silencing mutation. Because some PAMs can be silenced by more than 1 synonymous mutation, edit templates (RTTs) encoding a PAM silencing mutation and ngRNA spacers having 100% complementary with the portion of the edit strand containing the encoded PAM silencing mutation are coded with a number following the asterisk (*). Exemplary ngRNA provided in Table 26 can comprise a sequence corresponding to sequence number 2010, 2011, 2012, 2013, 2014, 2015, 2016, 2060, 2061, or 2062.

[0349] Table 27 provides Prime Editing guide RNAs (PEgRNAs) that can be used with any Prime Editor containing a Cas9 protein capable of recognizing a TG or TGA PAM sequence. The PEgRNAs of Table 27 can also be used in Prime Editing systems further comprising a nick guide RNA (ngRNA). Such PEgRNAs and Prime Editing systems can be used, for example, to correct an R778L mutation in ATP7B.

[0350] The PEgRNAs exemplified in Table 27 comprise: (a) a spacer comprising at its 3′ end a sequence corresponding to sequence number 6213; (b) a gRNA core capable of complexing with a Cas9 protein, and (c) an extension arm comprising: (i) an editing template at least 47 nucleotides in length and comprising at its 3′ end a sequence corresponding to sequence number 6237, and (ii) a prime binding site (PBS) comprising at its 5′ end a sequence corresponding to sequence number 6220. The PEgRNA spacer can be, for example, 16-22 nucleotides in length and can comprise the sequence corresponding to any one of sequence numbers 6213-6219. In some embodiments, the PEgRNA spacer comprises sequence number 6217. The PEgRNA spacers in Table 27 are annotated with their PAM sequence(s), enabling the selection of an appropriate Cas9 protein. The editing template can be referred to as a reverse transcription template (RTT). The editing template can encode wildtype ATP7B gene sequence. For example, the editing template can comprise at its 3′ end the sequence corresponding to any one of sequence numbers 6237-6290. Alternatively, the editing template can encode one or more synonymous mutations relative to the wildtype ATP7B gene. The PBS can be, for example, 3 to 19 nucleotides in length and can comprise the sequence corresponding to any one of sequence numbers 6220-6236. In some cases, a PBS length of no more than 3 nucleotides less than the PEgRNA spacer length is chosen.

[0351] Any of the PEgRNAs of Table 27 can be used in a Prime Editing system further comprising a nick guide RNA (ngRNA). Such ngRNA can comprise a spacer comprising at its 3′ end a sequence corresponding to nucleotides 5-20 of any ngRNA spacer listed in Table 27 and a gRNA core capable of complexing with a Cas9 protein. For example, the sequence in the spacer of the ngRNA can comprise nucleotides 5-20, 4-20, 3-20, 2-20, or 1-20 of sequence number 1989, 1990, 1992, 1994, 1995, 1996, 1997, 1998, 1999, 2000, 2001, 2003, 2004, 2005, 2006, 2008, 2056, 2057, 2058, 2059, 2125, 2126, 2127, 3248, 3262, or 4175. In some embodiments, the spacer of the ngRNA is a ngRNA spacer listed in Table 27. The ngRNA spacers in Table 27 are annotated with their PAM sequences, enabling selection of an appropriate Cas9 protein. It can be advantageous to select a ngRNA spacer that has a PAM sequence compatible with the Cas9 protein used in the Prime Editor, thus avoiding the need to use two different Cas9 proteins. The ngRNA is capable of directing a complexed Cas9 protein to bind the edit strand of the ATP7B gene; thus, a complexed Cas9 nickase containing a nuclease inactivating mutation in the HNH domain will nick the non-edit strand. A PE3 ngRNA spacer has perfect complementarity to the edit strand both pre- and post-edit; a PE3b ngRNA spacer has perfect complementarity to the edit strand post-edit; and a PE3* spacer has perfect complementarity to the edit strand post-edit with a PEgRNA containing an edit template encoding a PAM silencing mutation. Because some PAMs can be silenced by more than 1 synonymous mutation, edit templates (RTTs) encoding a PAM silencing mutation and ngRNA spacers having 100% complementary with the portion of the edit strand containing the encoded PAM silencing mutation are coded with a number following the asterisk (*). Exemplary ngRNA provided in Table 27 can comprise a sequence corresponding to sequence number 2010, 2011, 2012, 2013, 2014, 2015, 2016, 2060, 2061, or 2062.

[0352] Table 28 provides Prime Editing guide RNAs (PEgRNAs) that can be used with any Prime Editor containing a Cas9 protein capable of recognizing a TG or TGA PAM sequence. The PEgRNAs of Table 28 can also be used in Prime Editing systems further comprising a nick guide RNA (ngRNA). Such PEgRNAs and Prime Editing systems can be used, for example, to correct an R778L mutation in ATP7B.

[0353] The PEgRNAs exemplified in Table 28 comprise: (a) a spacer comprising at its 3′ end a sequence corresponding to sequence number 6291; (b) a gRNA core capable of complexing with a Cas9 protein, and (c) an extension arm comprising: (i) an editing template at least 41 nucleotides in length and comprising at its 3′ end a sequence corresponding to sequence number 6315, and (ii) a prime binding site (PBS) comprising at its 5′ end a sequence corresponding to sequence number 6298. The PEgRNA spacer can be, for example, 16-22 nucleotides in length and can comprise the sequence corresponding to any one of sequence numbers 6291-6297. In some embodiments, the PEgRNA spacer comprises sequence number 6295. The PEgRNA spacers in Table 28 are annotated with their PAM sequence(s), enabling the selection of an appropriate Cas9 protein. The editing template can be referred to as a reverse transcription template (RTT). The editing template can encode wildtype ATP7B gene sequence. For example, the editing template can comprise at its 3′ end the sequence corresponding to any one of sequence numbers 6315-6374. Alternatively, the editing template can encode one or more synonymous mutations relative to the wildtype ATP7B gene. The PBS can be, for example, 3 to 19 nucleotides in length and can comprise the sequence corresponding to any one of sequence numbers 6298-6314. In some cases, a PBS length of no more than 3 nucleotides less than the PEgRNA spacer length is chosen.

[0354] Any of the PEgRNAs of Table 28 can be used in a Prime Editing system further comprising a nick guide RNA (ngRNA). Such ngRNA can comprise a spacer comprising at its 3′ end a sequence corresponding to nucleotides 5-20 of any ngRNA spacer listed in Table 28 and a gRNA core capable of complexing with a Cas9 protein. For example, the sequence in the spacer of the ngRNA can comprise nucleotides 5-20, 4-20, 3-20, 2-20, or 1-20 of sequence number 1989, 1990, 1992, 1994, 1995, 1997, 1998, 2000, 2001, 2003, 2004, 2005, 2006, 2008, 2056, 2057, 2058, 2059, 2125, 2126, 2127, 3248, 3262, 3277, 3291, or 4175. In some embodiments, the spacer of the ngRNA is a ngRNA spacer listed in Table 28. The ngRNA spacers in Table 28 are annotated with their PAM sequences, enabling selection of an appropriate Cas9 protein. It can be advantageous to select a ngRNA spacer that has a PAM sequence compatible with the Cas9 protein used in the Prime Editor, thus avoiding the need to use two different Cas9 proteins. The ngRNA is capable of directing a complexed Cas9 protein to bind the edit strand of the ATP7B gene; thus, a complexed Cas9 nickase containing a nuclease inactivating mutation in the HNH domain will nick the non-edit strand. A PE3 ngRNA spacer has perfect complementarity to the edit strand both pre- and post-edit; a PE3b ngRNA spacer has perfect complementarity to the edit strand post-edit; and a PE3* spacer has perfect complementarity to the edit strand post-edit with a PEgRNA containing an edit template encoding a PAM silencing mutation. Because some PAMs can be silenced by more than 1 synonymous mutation, edit templates (RTTs) encoding a PAM silencing mutation and ngRNA spacers having 100% complementary with the portion of the edit strand containing the encoded PAM silencing mutation are coded with a number following the asterisk (*). Exemplary ngRNA provided in Table 28 can comprise a sequence corresponding to sequence number 2010, 2011, 2012, 2013, 2014, 2015, 2016, 2060, 2061, or 2062.

[0355] Table 29 provides Prime Editing guide RNAs (PEgRNAs) that can be used with any Prime Editor containing a Cas9 protein capable of recognizing a GAG PAM sequence. The PEgRNAs of Table 29 can also be used in Prime Editing systems further comprising a nick guide RNA (ngRNA). Such PEgRNAs and Prime Editing systems can be used, for example, to correct an R778L mutation in ATP7B. The PEgRNAs exemplified in Table 29 comprise: (a) a spacer comprising at its 3′ end a sequence corresponding to sequence number 6375; (b) a gRNA core capable of complexing with a Cas9 protein, and (c) an extension arm comprising: (i) an editing template at least 77 nucleotides in length and comprising at its 3′ end a sequence corresponding to any one of sequence numbers 6398-6399, and (ii) a prime binding site (PBS) comprising at its 5′ end a sequence corresponding to sequence number 5929. The PEgRNA spacer can be, for example, 16-22 nucleotides in length and can comprise the sequence corresponding to any one of sequence numbers 6375-6381. In some embodiments, the PEgRNA spacer comprises sequence number 6379. The PEgRNA spacers in Table 29 are annotated with their PAM sequence(s), enabling the selection of an appropriate Cas9 protein. The editing template can be referred to as a reverse transcription template (RTT). The editing template can encode wildtype ATP7B gene sequence. For example, the editing template can comprise at its 3′ end the sequence corresponding to sequence number 6399, 6401, 6403, 6404, 6407, 6408, 6410, 6412, 6415, 6417, 6419, 6421, 6423, 6425, 6427, 6428, 6431, 6433, 6435, 6437, 6438, 6441, 6442, or 6444. Alternatively, the editing template can encode one or more synonymous mutations relative to the wildtype ATP7B gene. The editing template can encode one or more synonymous mutations that are PAM silencing mutations and can comprise at its 3′ end the sequence corresponding to sequence number 6398, 6400, 6402, 6405, 6406, 6409, 6411, 6413, 6414, 6416, 6418, 6420, 6422, 6424, 6426, 6429, 6430, 6432, 6434, 6436, 6439, 6440, 6443, or 6445. The PBS can be, for example, 3 to 19 nucleotides in length and can comprise the sequence corresponding to sequence number 5929, 6382, 6383, 6384, 6385, 6386, 6387, 6388, 6389, 6390, 6391, 6392, 6393, 6394, 6395, 6396, or 6397. In some cases, a PBS length of no more than 3 nucleotides less than the PEgRNA spacer length is chosen.

[0356] Any of the PEgRNAs of Table 29 can be used in a Prime Editing system further comprising a nick guide RNA (ngRNA). Such ngRNA can comprise a spacer comprising at its 3′ end a sequence corresponding to nucleotides 5-20 of any ngRNA spacer listed in Table 29 and a gRNA core capable of complexing with a Cas9 protein. For example, the sequence in the spacer of the ngRNA can comprise nucleotides 5-20, 4-20, 3-20, 2-20, or 1-20 of sequence number 1224, 1227, 6446, 6447, 6448, 6449, 6450, 6451, 6452, 6453, 6454, 6455, 6456, or 6457. In some embodiments, the spacer of the ngRNA is a ngRNA spacer listed in Table 29. The ngRNA spacers in Table 29 are annotated with their PAM sequences, enabling selection of an appropriate Cas9 protein. It can be advantageous to select a ngRNA spacer that has a PAM sequence compatible with the Cas9 protein used in the Prime Editor, thus avoiding the need to use two different Cas9 proteins. The ngRNA is capable of directing a complexed Cas9 protein to bind the edit strand of the ATP7B gene; thus, a complexed Cas9 nickase containing a nuclease inactivating mutation in the HNH domain will nick the non-edit strand. A PE3 ngRNA spacer has perfect complementarity to the edit strand both pre- and post-edit; a PE3b ngRNA spacer has perfect complementarity to the edit strand post-edit; and a PE3* spacer has perfect complementarity to the edit strand post-edit with a PEgRNA containing an edit template encoding a PAM silencing mutation. Because some PAMs can be silenced by more than 1 synonymous mutation, edit templates (RTTs) encoding a PAM silencing mutation and ngRNA spacers having 100% complementary with the portion of the edit strand containing the encoded PAM silencing mutation are coded with a number following the asterisk (*).

[0357] Table 30 provides Prime Editing guide RNAs (PEgRNAs) that can be used with any Prime Editor containing a Cas9 protein capable of recognizing a AAG or AAGG PAM sequence. The PEgRNAs of Table 30 can also be used in Prime Editing systems further comprising a nick guide RNA (ngRNA). Such PEgRNAs and Prime Editing systems can be used, for example, to correct an R778L mutation in ATP7B.

[0358] The PEgRNAs exemplified in Table 30 comprise: (a) a spacer comprising at its 3′ end a sequence corresponding to sequence number 6458; (b) a gRNA core capable of complexing with a Cas9 protein, and (c) an extension arm comprising: (i) an editing template at least 74 nucleotides in length and comprising at its 3′ end a sequence corresponding to any one of sequence numbers 6482-6483, and (ii) a prime binding site (PBS) comprising at its 5′ end a sequence corresponding to sequence number 6465. The PEgRNA spacer can be, for example, 16-22 nucleotides in length and can comprise the sequence corresponding to any one of sequence numbers 6458-6464. In some embodiments, the PEgRNA spacer comprises sequence number 6462. The PEgRNA spacers in Table 30 are annotated with their PAM sequence(s), enabling the selection of an appropriate Cas9 protein. The editing template can be referred to as a reverse transcription template (RTT). The editing template can encode wildtype ATP7B gene sequence. For example, the editing template can comprise at its 3′ end the sequence corresponding to sequence number 6482, 6484, 6486, 6489, 6490, 6493, 6495, 6497, 6498, 6500, 6502, 6504, 6507, 6508, 6511, 6512, 6515, 6517, 6518, 6521, 6523, 6524, 6526, 6528, 6530, 6532, or 6535. Alternatively, the editing template can encode one or more synonymous mutations relative to the wildtype ATP7B gene. The editing template can encode one or more synonymous mutations that are PAM silencing mutations and can comprise at its 3′ end the sequence corresponding to sequence number 6483, 6485, 6487, 6488, 6491, 6492, 6494, 6496, 6499, 6501, 6503, 6505, 6506, 6509, 6510, 6513, 6514, 6516, 6519, 6520, 6522, 6525, 6527, 6529, 6531, 6533, or 6534. The PBS can be, for example, 3 to 19 nucleotides in length and can comprise the sequence corresponding to any one of sequence numbers 6465-6481. In some cases, a PBS length of no more than 3 nucleotides less than the PEgRNA spacer length is chosen.

[0359] Any of the PEgRNAs of Table 30 can be used in a Prime Editing system further comprising a nick guide RNA (ngRNA). Such ngRNA can comprise a spacer comprising at its 3′ end a sequence corresponding to nucleotides 5-20 of any ngRNA spacer listed in Table 30 and a gRNA core capable of complexing with a Cas9 protein. For example, the sequence in the spacer of the ngRNA can comprise nucleotides 5-20, 4-20, 3-20, 2-20, or 1-20 of sequence number 68, 76, 93, 95, 96, 98, 1224, 1227, 6446, 6448, 6449, 6450, 6453, 6454, 6455, 6456, 6457, 6536, or 6537. In some embodiments, the spacer of the ngRNA is a ngRNA spacer listed in Table 30. The ngRNA spacers in Table 30 are annotated with their PAM sequences, enabling selection of an appropriate Cas9 protein. It can be advantageous to select a ngRNA spacer that has a PAM sequence compatible with the Cas9 protein used in the Prime Editor, thus avoiding the need to use two different Cas9 proteins. The ngRNA is capable of directing a complexed Cas9 protein to bind the edit strand of the ATP7B gene; thus, a complexed Cas9 nickase containing a nuclease inactivating mutation in the HNH domain will nick the non-edit strand. A PE3 ngRNA spacer has perfect complementarity to the edit strand both pre- and post-edit; a PE3b ngRNA spacer has perfect complementarity to the edit strand post-edit; and a PE3* spacer has perfect complementarity to the edit strand post-edit with a PEgRNA containing an edit template encoding a PAM silencing mutation. Because some PAMs can be silenced by more than 1 synonymous mutation, edit templates (RTTs) encoding a PAM silencing mutation and ngRNA spacers having 100% complementary with the portion of the edit strand containing the encoded PAM silencing mutation are coded with a number following the asterisk (*). Exemplary ngRNA provided in Table 30 can comprise a sequence corresponding to sequence number 100, 101, 102, 104, 105, 109, 112, 113, or 117.

[0360] Table 31 provides Prime Editing guide RNAs (PEgRNAs) that can be used with any Prime Editor containing a Cas9 protein capable of recognizing a GAG PAM sequence. The PEgRNAs of Table 31 can also be used in Prime Editing systems further comprising a nick guide RNA (ngRNA). Such PEgRNAs and Prime Editing systems can be used, for example, to correct an R778L mutation in ATP7B.

[0361] The PEgRNAs exemplified in Table 31 comprise: (a) a spacer comprising at its 3′ end a sequence corresponding to sequence number 6538; (b) a gRNA core capable of complexing with a Cas9 protein, and (c) an extension arm comprising: (i) an editing template at least 68 nucleotides in length and comprising at its 3′ end a sequence corresponding to any one of sequence numbers 6562-6563, and (ii) a prime binding site (PBS) comprising at its 5′ end a sequence corresponding to sequence number 6545. The PEgRNA spacer can be, for example, 16-22 nucleotides in length and can comprise the sequence corresponding to any one of sequence numbers 6538-6544. In some embodiments, the PEgRNA spacer comprises sequence number 6542. The PEgRNA spacers in Table 31 are annotated with their PAM sequence(s), enabling the selection of an appropriate Cas9 protein. The editing template can be referred to as a reverse transcription template (RTT). The editing template can encode wildtype ATP7B gene sequence. For example, the editing template can comprise at its 3′ end the sequence corresponding to sequence number 6563, 6565, 6566, 6568, 6571, 6573, 6574, 6577, 6579, 6581, 6582, 6585, 6587, 6588, 6590, 6593, 6595, 6597, 6599, 6600, 6603, 6605, 6607, 6609, 6610, 6612, 6615, 6616, 6618, 6621, 6623, 6624, or 6626. Alternatively, the editing template can encode one or more synonymous mutations relative to the wildtype ATP7B gene. The editing template can encode one or more synonymous mutations that are PAM silencing mutations and can comprise at its 3′ end the sequence corresponding to sequence number 6562, 6564, 6567, 6569, 6570, 6572, 6575, 6576, 6578, 6580, 6583, 6584, 6586, 6589, 6591, 6592, 6594, 6596, 6598, 6601, 6602, 6604, 6606, 6608, 6611, 6613, 6614, 6617, 6619, 6620, 6622, 6625, or 6627. The PBS can be, for example, 3 to 19 nucleotides in length and can comprise the sequence corresponding to any one of sequence numbers 6545-6561. In some cases, a PBS length of no more than 3 nucleotides less than the PEgRNA spacer length is chosen.

[0362] Any of the PEgRNAs of Table 31 can be used in a Prime Editing system further comprising a nick guide RNA (ngRNA). Such ngRNA can comprise a spacer comprising at its 3′ end a sequence corresponding to nucleotides 5-20 of any ngRNA spacer listed in Table 31 and a gRNA core capable of complexing with a Cas9 protein. For example, the sequence in the spacer of the ngRNA can comprise nucleotides 5-20, 4-20, 3-20, 2-20, or 1-20 of sequence number 1224, 1227, 6446, 6448, 6449, 6453, 6454, 6455, 6456, or 6457. In some embodiments, the spacer of the ngRNA is a ngRNA spacer listed in Table 31. The ngRNA spacers in Table 31 are annotated with their PAM sequences, enabling selection of an appropriate Cas9 protein. It can be advantageous to select a ngRNA spacer that has a PAM sequence compatible with the Cas9 protein used in the Prime Editor, thus avoiding the need to use two different Cas9 proteins. The ngRNA is capable of directing a complexed Cas9 protein to bind the edit strand of the ATP7B gene; thus, a complexed Cas9 nickase containing a nuclease inactivating mutation in the HNH domain will nick the non-edit strand. A PE3 ngRNA spacer has perfect complementarity to the edit strand both pre- and post-edit; a PE3b ngRNA spacer has perfect complementarity to the edit strand post-edit; and a PE3* spacer has perfect complementarity to the edit strand post-edit with a PEgRNA containing an edit template encoding a PAM silencing mutation. Because some PAMs can be silenced by more than 1 synonymous mutation, edit templates (RTTs) encoding a PAM silencing mutation and ngRNA spacers having 100% complementary with the portion of the edit strand containing the encoded PAM silencing mutation are coded with a number following the asterisk (*).

[0363] Table 32 provides Prime Editing guide RNAs (PEgRNAs) that can be used with any Prime Editor containing a Cas9 protein capable of recognizing a GAG or GAGG PAM sequence. The PEgRNAs of Table 32 can also be used in Prime Editing systems further comprising a nick guide RNA (ngRNA). Such PEgRNAs and Prime Editing systems can be used, for example, to correct an R778L mutation in ATP7B.

[0364] The PEgRNAs exemplified in Table 32 comprise: (a) a spacer comprising at its 3′ end a sequence corresponding to sequence number 6628; (b) a gRNA core capable of complexing with a Cas9 protein, and (c) an extension arm comprising: (i) an editing template at least 66 nucleotides in length and comprising at its 3′ end a sequence corresponding to any one of sequence numbers 6651-6656, and (ii) a prime binding site (PBS) comprising at its 5′ end a sequence corresponding to sequence number 1735. The PEgRNA spacer can be, for example, 16-22 nucleotides in length and can comprise the sequence corresponding to any one of sequence numbers 6628-6634. In some embodiments, the PEgRNA spacer comprises sequence number 6632. The PEgRNA spacers in Table 32 are annotated with their PAM sequence(s), enabling the selection of an appropriate Cas9 protein. The editing template can be referred to as a reverse transcription template (RTT). The editing template can encode wildtype ATP7B gene sequence. For example, the editing template can comprise at its 3′ end the sequence corresponding to sequence number 6651, 6657, 6663, 6674, 6676, 6681, 6692, 6695, 6703, 6710, 6713, 6720, 6727, 6731, 6738, 6744, 6750, 6758, 6762, 6767, 6773, 6779, 6787, 6793, 6800, 6806, 6810, 6814, 6820, 6827, 6832, 6838, 6843, 6849, or 6857. Alternatively, the editing template can encode one or more synonymous mutations relative to the wildtype ATP7B gene. The editing template can encode one or more synonymous mutations that are PAM silencing mutations and can comprise at its 3′ end the sequence corresponding to sequence number 6652, 6653, 6654, 6655, 6656, 6658, 6659, 6660, 6661, 6662, 6664, 6665, 6666, 6667, 6668, 6669, 6670, 6671, 6672, 6673, 6675, 6677, 6678, 6679, 6680, 6682, 6683, 6684, 6685, 6686, 6687, 6688, 6689, 6690, 6691, 6693, 6694, 6696, 6697, 6698, 6699, 6700, 6701, 6702, 6704, 6705, 6706, 6707, 6708, 6709, 6711, 6712, 6714, 6715, 6716, 6717, 6718, 6719, 6721, 6722, 6723, 6724, 6725, 6726, 6728, 6729, 6730, 6732, 6733, 6734, 6735, 6736, 6737, 6739, 6740, 6741, 6742, 6743, 6745, 6746, 6747, 6748, 6749, 6751, 6752, 6753, 6754, 6755, 6756, 6757, 6759, 6760, 6761, 6763, 6764, 6765, 6766, 6768, 6769, 6770, 6771, 6772, 6774, 6775, 6776, 6777, 6778, 6780, 6781, 6782, 6783, 6784, 6785, 6786, 6788, 6789, 6790, 6791, 6792, 6794, 6795, 6796, 6797, 6798, 6799, 6801, 6802, 6803, 6804, 6805, 6807, 6808, 6809, 6811, 6812, 6813, 6815, 6816, 6817, 6818, 6819, 6821, 6822, 6823, 6824, 6825, 6826, 6828, 6829, 6830, 6831, 6833, 6834, 6835, 6836, 6837, 6839, 6840, 6841, 6842, 6844, 6845, 6846, 6847, 6848, 6850, 6851, 6852, 6853, 6854, 6855, 6856, 6858, 6859, or 6860. The PBS can be, for example, 3 to 19 nucleotides in length and can comprise the sequence corresponding to sequence number 1735, 6635, 6636, 6637, 6638, 6639, 6640, 6641, 6642, 6643, 6644, 6645, 6646, 6647, 6648, 6649, or 6650. In some cases, a PBS length of no more than 3 nucleotides less than the PEgRNA spacer length is chosen.

[0365] Any of the PEgRNAs of Table 32 can be used in a Prime Editing system further comprising a nick guide RNA (ngRNA). Such ngRNA can comprise a spacer comprising at its 3′ end a sequence corresponding to nucleotides 5-20 of any ngRNA spacer listed in Table 32 and a gRNA core capable of complexing with a Cas9 protein. For example, the sequence in the spacer of the ngRNA can comprise nucleotides 5-20, 4-20, 3-20, 2-20, or 1-20 of sequence number 68, 76, 93, 95, 96, 98, 1224, 1227, 6446, 6448, 6449, 6453, 6454, 6455, 6456, 6457, or 6536. In some embodiments, the spacer of the ngRNA is a ngRNA spacer listed in Table 32. The ngRNA spacers in Table 32 are annotated with their PAM sequences, enabling selection of an appropriate Cas9 protein. It can be advantageous to select a ngRNA spacer that has a PAM sequence compatible with the Cas9 protein used in the Prime Editor, thus avoiding the need to use two different Cas9 proteins. The ngRNA is capable of directing a complexed Cas9 protein to bind the edit strand of the ATP7B gene; thus, a complexed Cas9 nickase containing a nuclease inactivating mutation in the HNH domain will nick the non-edit strand. A PE3 ngRNA spacer has perfect complementarity to the edit strand both pre- and post-edit; a PE3b ngRNA spacer has perfect complementarity to the edit strand post-edit; and a PE3* spacer has perfect complementarity to the edit strand post-edit with a PEgRNA containing an edit template encoding a PAM silencing mutation. Because some PAMs can be silenced by more than 1 synonymous mutation, edit templates (RTTs) encoding a PAM silencing mutation and ngRNA spacers having 100% complementary with the portion of the edit strand containing the encoded PAM silencing mutation are coded with a number following the asterisk (*). Exemplary ngRNA provided in Table 32 can comprise a sequence corresponding to sequence number 100, 101, 102, 104, 105, 109, 112, 113, or 117.

[0366] Table 33 provides Prime Editing guide RNAs (PEgRNAs) that can be used with any Prime Editor containing a Cas9 protein capable of recognizing a GAG PAM sequence. The PEgRNAs of Table 33 can also be used in Prime Editing systems further comprising a nick guide RNA (ngRNA). Such PEgRNAs and Prime Editing systems can be used, for example, to correct an R778L mutation in ATP7B.

[0367] The PEgRNAs exemplified in Table 33 comprise: (a) a spacer comprising at its 3′ end a sequence corresponding to sequence number 6861; (b) a gRNA core capable of complexing with a Cas9 protein, and (c) an extension arm comprising: (i) an editing template at least 63 nucleotides in length and comprising at its 3′ end a sequence corresponding to any one of sequence numbers 6885-6889, and (ii) a prime binding site (PBS) comprising at its 5′ end a sequence corresponding to sequence number 6868. The PEgRNA spacer can be, for example, 16-22 nucleotides in length and can comprise the sequence corresponding to any one of sequence numbers 6861-6867. In some embodiments, the PEgRNA spacer comprises sequence number 6865. The PEgRNA spacers in Table 33 are annotated with their PAM sequence(s), enabling the selection of an appropriate Cas9 protein. The editing template can be referred to as a reverse transcription template (RTT). The editing template can encode wildtype ATP7B gene sequence. For example, the editing template can comprise at its 3′ end the sequence corresponding to sequence number 6886, 6892, 6899, 6903, 6907, 6913, 6919, 6922, 6928, 6932, 6936, 6940, 6947, 6950, 6958, 6964, 6966, 6973, 6979, 6980, 6987, 6990, 6999, 7003, 7009, 7014, 7017, 7021, 7027, 7030, 7036, 7043, 7047, 7050, 7058, 7063, 7067, or 7070. Alternatively, the editing template can encode one or more synonymous mutations relative to the wildtype ATP7B gene. The editing template can encode one or more synonymous mutations that are PAM silencing mutations and can comprise at its 3′ end the sequence corresponding to sequence number 6885, 6887, 6888, 6889, 6890, 6891, 6893, 6894, 6895, 6896, 6897, 6898, 6900, 6901, 6902, 6904, 6905, 6906, 6908, 6909, 6910, 6911, 6912, 6914, 6915, 6916, 6917, 6918, 6920, 6921, 6923, 6924, 6925, 6926, 6927, 6929, 6930, 6931, 6933, 6934, 6935, 6937, 6938, 6939, 6941, 6942, 6943, 6944, 6945, 6946, 6948, 6949, 6951, 6952, 6953, 6954, 6955, 6956, 6957, 6959, 6960, 6961, 6962, 6963, 6965, 6967, 6968, 6969, 6970, 6971, 6972, 6974, 6975, 6976, 6977, 6978, 6981, 6982, 6983, 6984, 6985, 6986, 6988, 6989, 6991, 6992, 6993, 6994, 6995, 6996, 6997, 6998, 7000, 7001, 7002, 7004, 7005, 7006, 7007, 7008, 7010, 7011, 7012, 7013, 7015, 7016, 7018, 7019, 7020, 7022, 7023, 7024, 7025, 7026, 7028, 7029, 7031, 7032, 7033, 7034, 7035, 7037, 7038, 7039, 7040, 7041, 7042, 7044, 7045, 7046, 7048, 7049, 7051, 7052, 7053, 7054, 7055, 7056, 7057, 7059, 7060, 7061, 7062, 7064, 7065, 7066, 7068, 7069, 7071, 7072, 7073, or 7074. The PBS can be, for example, 3 to 19 nucleotides in length and can comprise the sequence corresponding to any one of sequence numbers 6868-6884. In some cases, a PBS length of no more than 3 nucleotides less than the PEgRNA spacer length is chosen.

[0368] Any of the PEgRNAs of Table 33 can be used in a Prime Editing system further comprising a nick guide RNA (ngRNA). Such ngRNA can comprise a spacer comprising at its 3′ end a sequence corresponding to nucleotides 5-20 of any ngRNA spacer listed in Table 33 and a gRNA core capable of complexing with a Cas9 protein. For example, the sequence in the spacer of the ngRNA can comprise nucleotides 5-20, 4-20, 3-20, 2-20, or 1-20 of sequence number 1224, 1227, 6446, 6448, 6449, 6453, 6454, 6455, 6456, or 6457. In some embodiments, the spacer of the ngRNA is a ngRNA spacer listed in Table 33. The ngRNA spacers in Table 33 are annotated with their PAM sequences, enabling selection of an appropriate Cas9 protein. It can be advantageous to select a ngRNA spacer that has a PAM sequence compatible with the Cas9 protein used in the Prime Editor, thus avoiding the need to use two different Cas9 proteins. The ngRNA is capable of directing a complexed Cas9 protein to bind the edit strand of the ATP7B gene; thus, a complexed Cas9 nickase containing a nuclease inactivating mutation in the HNH domain will nick the non-edit strand. A PE3 ngRNA spacer has perfect complementarity to the edit strand both pre- and post-edit; a PE3b ngRNA spacer has perfect complementarity to the edit strand post-edit; and a PE3* spacer has perfect complementarity to the edit strand post-edit with a PEgRNA containing an edit template encoding a PAM silencing mutation. Because some PAMs can be silenced by more than 1 synonymous mutation, edit templates (RTTs) encoding a PAM silencing mutation and ngRNA spacers having 100% complementary with the portion of the edit strand containing the encoded PAM silencing mutation are coded with a number following the asterisk (*).

[0369] Table 34 provides Prime Editing guide RNAs (PEgRNAs) that can be used with any Prime Editor containing a Cas9 protein capable of recognizing a CAG PAM sequence. The PEgRNAs of Table 34 can also be used in Prime Editing systems further comprising a nick guide RNA (ngRNA). Such PEgRNAs and Prime Editing systems can be used, for example, to correct an R778L mutation in ATP7B.

[0370] The PEgRNAs exemplified in Table 34 comprise: (a) a spacer comprising at its 3′ end a sequence corresponding to sequence number 7075; (b) a gRNA core capable of complexing with a Cas9 protein, and (c) an extension arm comprising: (i) an editing template at least 89 nucleotides in length and comprising at its 3′ end a sequence corresponding to sequence number 7099, and (ii) a prime binding site (PBS) comprising at its 5′ end a sequence corresponding to sequence number 7082. The PEgRNA spacer can be, for example, 16-22 nucleotides in length and can comprise the sequence corresponding to any one of sequence numbers 7075-7081. In some embodiments, the PEgRNA spacer comprises sequence number 7079. The PEgRNA spacers in Table 34 are annotated with their PAM sequence(s), enabling the selection of an appropriate Cas9 protein. The editing template can be referred to as a reverse transcription template (RTT). The editing template can encode wildtype ATP7B gene sequence. For example, the editing template can comprise at its 3′ end the sequence corresponding to any one of sequence numbers 7099-7110. Alternatively, the editing template can encode one or more synonymous mutations relative to the wildtype ATP7B gene. The PBS can be, for example, 3 to 19 nucleotides in length and can comprise the sequence corresponding to any one of sequence numbers 7082-7098. In some cases, a PBS length of no more than 3 nucleotides less than the PEgRNA spacer length is chosen.

[0371] Any of the PEgRNAs of Table 34 can be used in a Prime Editing system further comprising a nick guide RNA (ngRNA). Such ngRNA can comprise a spacer comprising at its 3′ end a sequence corresponding to nucleotides 5-20 of any ngRNA spacer listed in Table 34 and a gRNA core capable of complexing with a Cas9 protein. For example, the sequence in the spacer of the ngRNA can comprise nucleotides 5-20, 4-20, 3-20, 2-20, or 1-20 of sequence number 6454, 6455, 7111, 7112, 7113, 7114, 7115, 7116, 7117, or 7118. In some embodiments, the spacer of the ngRNA is a ngRNA spacer listed in Table 34. The ngRNA spacers in Table 34 are annotated with their PAM sequences, enabling selection of an appropriate Cas9 protein. It can be advantageous to select a ngRNA spacer that has a PAM sequence compatible with the Cas9 protein used in the Prime Editor, thus avoiding the need to use two different Cas9 proteins. The ngRNA is capable of directing a complexed Cas9 protein to bind the edit strand of the ATP7B gene; thus, a complexed Cas9 nickase containing a nuclease inactivating mutation in the HNH domain will nick the non-edit strand. A PE3 ngRNA spacer has perfect complementarity to the edit strand both pre- and post-edit; a PE3b ngRNA spacer has perfect complementarity to the edit strand post-edit; and a PE3* spacer has perfect complementarity to the edit strand post-edit with a PEgRNA containing an edit template encoding a PAM silencing mutation. Because some PAMs can be silenced by more than 1 synonymous mutation, edit templates (RTTs) encoding a PAM silencing mutation and ngRNA spacers having 100% complementary with the portion of the edit strand containing the encoded PAM silencing mutation are coded with a number following the asterisk (*).

[0372] Table 35 provides Prime Editing guide RNAs (PEgRNAs) that can be used with any Prime Editor containing a Cas9 protein capable of recognizing a GAG or GAGG PAM sequence. The PEgRNAs of Table 35 can also be used in Prime Editing systems further comprising a nick guide RNA (ngRNA). Such PEgRNAs and Prime Editing systems can be used, for example, to correct an R778L mutation in ATP7B.

[0373] The PEgRNAs exemplified in Table 35 comprise: (a) a spacer comprising at its 3′ end a sequence corresponding to sequence number 7119; (b) a gRNA core capable of complexing with a Cas9 protein, and (c) an extension arm comprising: (i) an editing template at least 87 nucleotides in length and comprising at its 3′ end a sequence corresponding to sequence number 7142, and (ii) a prime binding site (PBS) comprising at its 5′ end a sequence corresponding to sequence number 4135. The PEgRNA spacer can be, for example, 16-22 nucleotides in length and can comprise the sequence corresponding to any one of sequence numbers 7119-7125. In some embodiments, the PEgRNA spacer comprises sequence number 7123. The PEgRNA spacers in Table 35 are annotated with their PAM sequence(s), enabling the selection of an appropriate Cas9 protein. The editing template can be referred to as a reverse transcription template (RTT). The editing template can encode wildtype ATP7B gene sequence. For example, the editing template can comprise at its 3′ end the sequence corresponding to any one of sequence numbers 7142-7155. Alternatively, the editing template can encode one or more synonymous mutations relative to the wildtype ATP7B gene. The PBS can be, for example, 3 to 19 nucleotides in length and can comprise the sequence corresponding to sequence number 4135, 7126, 7127, 7128, 7129, 7130, 7131, 7132, 7133, 7134, 7135, 7136, 7137, 7138, 7139, 7140, or 7141. In some cases, a PBS length of no more than 3 nucleotides less than the PEgRNA spacer length is chosen.

[0374] Any of the PEgRNAs of Table 35 can be used in a Prime Editing system further comprising a nick guide RNA (ngRNA). Such ngRNA can comprise a spacer comprising at its 3′ end a sequence corresponding to nucleotides 5-20 of any ngRNA spacer listed in Table 35 and a gRNA core capable of complexing with a Cas9 protein. For example, the sequence in the spacer of the ngRNA can comprise nucleotides 5-20, 4-20, 3-20, 2-20, or 1-20 of sequence number 2056, 6454, 6455, 7111, 7112, 7113, 7114, 7115, 7116, 7117, 7118, 7156, 7157, 7158, or 7159. In some embodiments, the spacer of the ngRNA is a ngRNA spacer listed in Table 35. The ngRNA spacers in Table 35 are annotated with their PAM sequences, enabling selection of an appropriate Cas9 protein. It can be advantageous to select a ngRNA spacer that has a PAM sequence compatible with the Cas9 protein used in the Prime Editor, thus avoiding the need to use two different Cas9 proteins. The ngRNA is capable of directing a complexed Cas9 protein to bind the edit strand of the ATP7B gene; thus, a complexed Cas9 nickase containing a nuclease inactivating mutation in the HNH domain will nick the non-edit strand. A PE3 ngRNA spacer has perfect complementarity to the edit strand both pre- and post-edit; a PE3b ngRNA spacer has perfect complementarity to the edit strand post-edit; and a PE3* spacer has perfect complementarity to the edit strand post-edit with a PEgRNA containing an edit template encoding a PAM silencing mutation. Because some PAMs can be silenced by more than 1 synonymous mutation, edit templates (RTTs) encoding a PAM silencing mutation and ngRNA spacers having 100% complementary with the portion of the edit strand containing the encoded PAM silencing mutation are coded with a number following the asterisk (*). Exemplary ngRNA provided in Table 35 can comprise a sequence corresponding to sequence number 2061.

[0375] Table 36 provides Prime Editing guide RNAs (PEgRNAs) that can be used with any Prime Editor containing a Cas9 protein capable of recognizing a AAG PAM sequence. The PEgRNAs of Table 36 can also be used in Prime Editing systems further comprising a nick guide RNA (ngRNA). Such PEgRNAs and Prime Editing systems can be used, for example, to correct an R778L mutation in ATP7B.

[0376] The PEgRNAs exemplified in Table 36 comprise: (a) a spacer comprising at its 3′ end a sequence corresponding to sequence number 7160; (b) a gRNA core capable of complexing with a Cas9 protein, and (c) an extension arm comprising: (i) an editing template at least 83 nucleotides in length and comprising at its 3′ end a sequence corresponding to sequence number 7184, and (ii) a prime binding site (PBS) comprising at its 5′ end a sequence corresponding to sequence number 7167. The PEgRNA spacer can be, for example, 16-22 nucleotides in length and can comprise the sequence corresponding to any one of sequence numbers 7160-7166. In some embodiments, the PEgRNA spacer comprises sequence number 7164. The PEgRNA spacers in Table 36 are annotated with their PAM sequence(s), enabling the selection of an appropriate Cas9 protein. The editing template can be referred to as a reverse transcription template (RTT). The editing template can encode wildtype ATP7B gene sequence. For example, the editing template can comprise at its 3′ end the sequence corresponding to any one of sequence numbers 7184-7201. Alternatively, the editing template can encode one or more synonymous mutations relative to the wildtype ATP7B gene. The PBS can be, for example, 3 to 19 nucleotides in length and can comprise the sequence corresponding to any one of sequence numbers 7167-7183. In some cases, a PBS length of no more than 3 nucleotides less than the PEgRNA spacer length is chosen.

[0377] Any of the PEgRNAs of Table 36 can be used in a Prime Editing system further comprising a nick guide RNA (ngRNA). Such ngRNA can comprise a spacer comprising at its 3′ end a sequence corresponding to nucleotides 5-20 of any ngRNA spacer listed in Table 36 and a gRNA core capable of complexing with a Cas9 protein. For example, the sequence in the spacer of the ngRNA can comprise nucleotides 5-20, 4-20, 3-20, 2-20, or 1-20 of sequence number 6454, 6455, 7111, 7112, 7113, 7114, 7115, 7116, 7117, or 7118. In some embodiments, the spacer of the ngRNA is a ngRNA spacer listed in Table 36. The ngRNA spacers in Table 36 are annotated with their PAM sequences, enabling selection of an appropriate Cas9 protein. It can be advantageous to select a ngRNA spacer that has a PAM sequence compatible with the Cas9 protein used in the Prime Editor, thus avoiding the need to use two different Cas9 proteins. The ngRNA is capable of directing a complexed Cas9 protein to bind the edit strand of the ATP7B gene; thus, a complexed Cas9 nickase containing a nuclease inactivating mutation in the HNH domain will nick the non-edit strand. A PE3 ngRNA spacer has perfect complementarity to the edit strand both pre- and post-edit; a PE3b ngRNA spacer has perfect complementarity to the edit strand post-edit; and a PE3* spacer has perfect complementarity to the edit strand post-edit with a PEgRNA containing an edit template encoding a PAM silencing mutation. Because some PAMs can be silenced by more than 1 synonymous mutation, edit templates (RTTs) encoding a PAM silencing mutation and ngRNA spacers having 100% complementary with the portion of the edit strand containing the encoded PAM silencing mutation are coded with a number following the asterisk (*).

[0378] Table 37 provides Prime Editing guide RNAs (PEgRNAs) that can be used with any Prime Editor containing a Cas9 protein capable of recognizing a GAG PAM sequence. The PEgRNAs of Table 37 can also be used in Prime Editing systems further comprising a nick guide RNA (ngRNA). Such PEgRNAs and Prime Editing systems can be used, for example, to correct an R778L mutation in ATP7B.

[0379] The PEgRNAs exemplified in Table 37 comprise: (a) a spacer comprising at its 3′ end a sequence corresponding to sequence number 7202; (b) a gRNA core capable of complexing with a Cas9 protein, and (c) an extension arm comprising: (i) an editing template at least 79 nucleotides in length and comprising at its 3′ end a sequence corresponding to sequence number 7225, and (ii) a prime binding site (PBS) comprising at its 5′ end a sequence corresponding to sequence number 6868. The PEgRNA spacer can be, for example, 16-22 nucleotides in length and can comprise the sequence corresponding to any one of sequence numbers 7202-7208. In some embodiments, the PEgRNA spacer comprises sequence number 7206. The PEgRNA spacers in Table 37 are annotated with their PAM sequence(s), enabling the selection of an appropriate Cas9 protein. The editing template can be referred to as a reverse transcription template (RTT). The editing template can encode wildtype ATP7B gene sequence. For example, the editing template can comprise at its 3′ end the sequence corresponding to any one of sequence numbers 7225-7246. Alternatively, the editing template can encode one or more synonymous mutations relative to the wildtype ATP7B gene. The PBS can be, for example, 3 to 19 nucleotides in length and can comprise the sequence corresponding to sequence number 6868, 7209, 7210, 7211, 7212, 7213, 7214, 7215, 7216, 7217, 7218, 7219, 7220, 7221, 7222, 7223, or 7224. In some cases, a PBS length of no more than 3 nucleotides less than the PEgRNA spacer length is chosen.

[0380] Any of the PEgRNAs of Table 37 can be used in a Prime Editing system further comprising a nick guide RNA (ngRNA). Such ngRNA can comprise a spacer comprising at its 3′ end a sequence corresponding to nucleotides 5-20 of any ngRNA spacer listed in Table 37 and a gRNA core capable of complexing with a Cas9 protein. For example, the sequence in the spacer of the ngRNA can comprise nucleotides 5-20, 4-20, 3-20, 2-20, or 1-20 of sequence number 6454, 6455, 7111, 7112, 7113, 7114, 7115, 7116, 7117, or 7118. In some embodiments, the spacer of the ngRNA is a ngRNA spacer listed in Table 37. The ngRNA spacers in Table 37 are annotated with their PAM sequences, enabling selection of an appropriate Cas9 protein. It can be advantageous to select a ngRNA spacer that has a PAM sequence compatible with the Cas9 protein used in the Prime Editor, thus avoiding the need to use two different Cas9 proteins. The ngRNA is capable of directing a complexed Cas9 protein to bind the edit strand of the ATP7B gene; thus, a complexed Cas9 nickase containing a nuclease inactivating mutation in the HNH domain will nick the non-edit strand. A PE3 ngRNA spacer has perfect complementarity to the edit strand both pre- and post-edit; a PE3b ngRNA spacer has perfect complementarity to the edit strand post-edit; and a PE3* spacer has perfect complementarity to the edit strand post-edit with a PEgRNA containing an edit template encoding a PAM silencing mutation. Because some PAMs can be silenced by more than 1 synonymous mutation, edit templates (RTTs) encoding a PAM silencing mutation and ngRNA spacers having 100% complementary with the portion of the edit strand containing the encoded PAM silencing mutation are coded with a number following the asterisk (*).

[0381] Table 38 provides Prime Editing guide RNAs (PEgRNAs) that can be used with any Prime Editor containing a Cas9 protein capable of recognizing a AAG or AAGG PAM sequence. The PEgRNAs of Table 38 can also be used in Prime Editing systems further comprising a nick guide RNA (ngRNA). Such PEgRNAs and Prime Editing systems can be used, for example, to correct an R778L mutation in ATP7B.

[0382] The PEgRNAs exemplified in Table 38 comprise: (a) a spacer comprising at its 3′ end a sequence corresponding to sequence number 7247; (b) a gRNA core capable of complexing with a Cas9 protein, and (c) an extension arm comprising: (i) an editing template at least 64 nucleotides in length and comprising at its 3′ end a sequence corresponding to sequence number 7271, and (ii) a prime binding site (PBS) comprising at its 5′ end a sequence corresponding to sequence number 7254. The PEgRNA spacer can be, for example, 16-22 nucleotides in length and can comprise the sequence corresponding to any one of sequence numbers 7247-7253. In some embodiments, the PEgRNA spacer comprises sequence number 7251. The PEgRNA spacers in Table 38 are annotated with their PAM sequence(s), enabling the selection of an appropriate Cas9 protein. The editing template can be referred to as a reverse transcription template (RTT). The editing template can encode wildtype ATP7B gene sequence. For example, the editing template can comprise at its 3′ end the sequence corresponding to any one of sequence numbers 7271-7307. Alternatively, the editing template can encode one or more synonymous mutations relative to the wildtype ATP7B gene. The PBS can be, for example, 3 to 19 nucleotides in length and can comprise the sequence corresponding to any one of sequence numbers 7254-7270. In some cases, a PBS length of no more than 3 nucleotides less than the PEgRNA spacer length is chosen.

[0383] Any of the PEgRNAs of Table 38 can be used in a Prime Editing system further comprising a nick guide RNA (ngRNA). Such ngRNA can comprise a spacer comprising at its 3′ end a sequence corresponding to nucleotides 5-20 of any ngRNA spacer listed in Table 38 and a gRNA core capable of complexing with a Cas9 protein. For example, the sequence in the spacer of the ngRNA can comprise nucleotides 5-20, 4-20, 3-20, 2-20, or 1-20 of sequence number 2056, 6454, 6455, 7111, 7112, 7113, 7114, 7115, 7116, 7117, 7118, 7156, 7157, 7158, or 7159. In some embodiments, the spacer of the ngRNA is a ngRNA spacer listed in Table 38. The ngRNA spacers in Table 38 are annotated with their PAM sequences, enabling selection of an appropriate Cas9 protein. It can be advantageous to select a ngRNA spacer that has a PAM sequence compatible with the Cas9 protein used in the Prime Editor, thus avoiding the need to use two different Cas9 proteins. The ngRNA is capable of directing a complexed Cas9 protein to bind the edit strand of the ATP7B gene; thus, a complexed Cas9 nickase containing a nuclease inactivating mutation in the HNH domain will nick the non-edit strand. A PE3 ngRNA spacer has perfect complementarity to the edit strand both pre- and post-edit; a PE3b ngRNA spacer has perfect complementarity to the edit strand post-edit; and a PE3* spacer has perfect complementarity to the edit strand post-edit with a PEgRNA containing an edit template encoding a PAM silencing mutation. Because some PAMs can be silenced by more than 1 synonymous mutation, edit templates (RTTs) encoding a PAM silencing mutation and ngRNA spacers having 100% complementary with the portion of the edit strand containing the encoded PAM silencing mutation are coded with a number following the asterisk (*). Exemplary ngRNA provided in Table 38 can comprise a sequence corresponding to sequence number 2061.

[0384] Table 39 provides Prime Editing guide RNAs (PEgRNAs) that can be used with any Prime Editor containing a Cas9 protein capable of recognizing a GAG PAM sequence. The PEgRNAs of Table 39 can also be used in Prime Editing systems further comprising a nick guide RNA (ngRNA). Such PEgRNAs and Prime Editing systems can be used, for example, to correct an R778L mutation in ATP7B.

[0385] The PEgRNAs exemplified in Table 39 comprise: (a) a spacer comprising at its 3′ end a sequence corresponding to sequence number 7308; (b) a gRNA core capable of complexing with a Cas9 protein, and (c) an extension arm comprising: (i) an editing template at least 61 nucleotides in length and comprising at its 3′ end a sequence corresponding to sequence number 7331, and (ii) a prime binding site (PBS) comprising at its 5′ end a sequence corresponding to sequence number 305. The PEgRNA spacer can be, for example, 16-22 nucleotides in length and can comprise the sequence corresponding to any one of sequence numbers 7308-7314. In some embodiments, the PEgRNA spacer comprises sequence number 7312. The PEgRNA spacers in Table 39 are annotated with their PAM sequence(s), enabling the selection of an appropriate Cas9 protein. The editing template can be referred to as a reverse transcription template (RTT). The editing template can encode wildtype ATP7B gene sequence. For example, the editing template can comprise at its 3′ end the sequence corresponding to any one of sequence numbers 7331-7370. Alternatively, the editing template can encode one or more synonymous mutations relative to the wildtype ATP7B gene. The PBS can be, for example, 3 to 19 nucleotides in length and can comprise the sequence corresponding to sequence number 305, 7315, 7316, 7317, 7318, 7319, 7320, 7321, 7322, 7323, 7324, 7325, 7326, 7327, 7328, 7329, or 7330. In some cases, a PBS length of no more than 3 nucleotides less than the PEgRNA spacer length is chosen.

[0386] Any of the PEgRNAs of Table 39 can be used in a Prime Editing system further comprising a nick guide RNA (ngRNA). Such ngRNA can comprise a spacer comprising at its 3′ end a sequence corresponding to nucleotides 5-20 of any ngRNA spacer listed in Table 39 and a gRNA core capable of complexing with a Cas9 protein. For example, the sequence in the spacer of the ngRNA can comprise nucleotides 5-20, 4-20, 3-20, 2-20, or 1-20 of sequence number 6454, 6455, 7111, 7112, 7113, 7114, 7115, 7116, 7117, or 7118. In some embodiments, the spacer of the ngRNA is a ngRNA spacer listed in Table 39. The ngRNA spacers in Table 39 are annotated with their PAM sequences, enabling selection of an appropriate Cas9 protein. It can be advantageous to select a ngRNA spacer that has a PAM sequence compatible with the Cas9 protein used in the Prime Editor, thus avoiding the need to use two different Cas9 proteins. The ngRNA is capable of directing a complexed Cas9 protein to bind the edit strand of the ATP7B gene; thus, a complexed Cas9 nickase containing a nuclease inactivating mutation in the HNH domain will nick the non-edit strand. A PE3 ngRNA spacer has perfect complementarity to the edit strand both pre- and post-edit; a PE3b ngRNA spacer has perfect complementarity to the edit strand post-edit; and a PE3* spacer has perfect complementarity to the edit strand post-edit with a PEgRNA containing an edit template encoding a PAM silencing mutation. Because some PAMs can be silenced by more than 1 synonymous mutation, edit templates (RTTs) encoding a PAM silencing mutation and ngRNA spacers having 100% complementary with the portion of the edit strand containing the encoded PAM silencing mutation are coded with a number following the asterisk (*).

[0387] Table 40 provides Prime Editing guide RNAs (PEgRNAs) that can be used with any Prime Editor containing a Cas9 protein capable of recognizing a CAG PAM sequence. The PEgRNAs of Table 40 can also be used in Prime Editing systems further comprising a nick guide RNA (ngRNA). Such PEgRNAs and Prime Editing systems can be used, for example, to correct an R778L mutation in ATP7B.

[0388] The PEgRNAs exemplified in Table 40 comprise: (a) a spacer comprising at its 3′ end a sequence corresponding to sequence number 7371; (b) a gRNA core capable of complexing with a Cas9 protein, and (c) an extension arm comprising: (i) an editing template at least 58 nucleotides in length and comprising at its 3′ end a sequence corresponding to sequence number 7393, and (ii) a prime binding site (PBS) comprising at its 5′ end a sequence corresponding to sequence number 6545. The PEgRNA spacer can be, for example, 16-22 nucleotides in length and can comprise the sequence corresponding to any one of sequence numbers 7371-7377. In some embodiments, the PEgRNA spacer comprises sequence number 7375. The PEgRNA spacers in Table 40 are annotated with their PAM sequence(s), enabling the selection of an appropriate Cas9 protein. The editing template can be referred to as a reverse transcription template (RTT). The editing template can encode wildtype ATP7B gene sequence. For example, the editing template can comprise at its 3′ end the sequence corresponding to any one of sequence numbers 7393-7435. Alternatively, the editing template can encode one or more synonymous mutations relative to the wildtype ATP7B gene. The PBS can be, for example, 3 to 19 nucleotides in length and can comprise the sequence corresponding to sequence number 6545, 6546, 7378, 7379, 7380, 7381, 7382, 7383, 7384, 7385, 7386, 7387, 7388, 7389, 7390, 7391, or 7392. In some cases, a PBS length of no more than 3 nucleotides less than the PEgRNA spacer length is chosen.

[0389] Any of the PEgRNAs of Table 40 can be used in a Prime Editing system further comprising a nick guide RNA (ngRNA). Such ngRNA can comprise a spacer comprising at its 3′ end a sequence corresponding to nucleotides 5-20 of any ngRNA spacer listed in Table 40 and a gRNA core capable of complexing with a Cas9 protein. For example, the sequence in the spacer of the ngRNA can comprise nucleotides 5-20, 4-20, 3-20, 2-20, or 1-20 of sequence number 6454, 6455, 7111, 7112, 7113, 7114, 7115, 7116, 7117, or 7118. In some embodiments, the spacer of the ngRNA is a ngRNA spacer listed in Table 40. The ngRNA spacers in Table 40 are annotated with their PAM sequences, enabling selection of an appropriate Cas9 protein. It can be advantageous to select a ngRNA spacer that has a PAM sequence compatible with the Cas9 protein used in the Prime Editor, thus avoiding the need to use two different Cas9 proteins. The ngRNA is capable of directing a complexed Cas9 protein to bind the edit strand of the ATP7B gene; thus, a complexed Cas9 nickase containing a nuclease inactivating mutation in the HNH domain will nick the non-edit strand. A PE3 ngRNA spacer has perfect complementarity to the edit strand both pre- and post-edit; a PE3b ngRNA spacer has perfect complementarity to the edit strand post-edit; and a PE3* spacer has perfect complementarity to the edit strand post-edit with a PEgRNA containing an edit template encoding a PAM silencing mutation. Because some PAMs can be silenced by more than 1 synonymous mutation, edit templates (RTTs) encoding a PAM silencing mutation and ngRNA spacers having 100% complementary with the portion of the edit strand containing the encoded PAM silencing mutation are coded with a number following the asterisk (*).

[0390] Table 41 provides Prime Editing guide RNAs (PEgRNAs) that can be used with any Prime Editor containing a Cas9 protein capable of recognizing a AAG PAM sequence. The PEgRNAs of Table 41 can also be used in Prime Editing systems further comprising a nick guide RNA (ngRNA). Such PEgRNAs and Prime Editing systems can be used, for example, to correct an R778L mutation in ATP7B.

[0391] The PEgRNAs exemplified in Table 41 comprise: (a) a spacer comprising at its 3′ end a sequence corresponding to sequence number 7436; (b) a gRNA core capable of complexing with a Cas9 protein, and (c) an extension arm comprising: (i) an editing template at least 39 nucleotides in length and comprising at its 3′ end a sequence corresponding to sequence number 7460, and (ii) a prime binding site (PBS) comprising at its 5′ end a sequence corresponding to sequence number 7443. The PEgRNA spacer can be, for example, 16-22 nucleotides in length and can comprise the sequence corresponding to any one of sequence numbers 7436-7442. In some embodiments, the PEgRNA spacer comprises sequence number 7440. The PEgRNA spacers in Table 41 are annotated with their PAM sequence(s), enabling the selection of an appropriate Cas9 protein. The editing template can be referred to as a reverse transcription template (RTT). The editing template can encode wildtype ATP7B gene sequence. For example, the editing template can comprise at its 3′ end the sequence corresponding to any one of sequence numbers 7460-7521. Alternatively, the editing template can encode one or more synonymous mutations relative to the wildtype ATP7B gene. The PBS can be, for example, 3 to 19 nucleotides in length and can comprise the sequence corresponding to any one of sequence numbers 7443-7459. In some cases, a PBS length of no more than 3 nucleotides less than the PEgRNA spacer length is chosen.

[0392] Any of the PEgRNAs of Table 41 can be used in a Prime Editing system further comprising a nick guide RNA (ngRNA). Such ngRNA can comprise a spacer comprising at its 3′ end a sequence corresponding to nucleotides 5-20 of any ngRNA spacer listed in Table 41 and a gRNA core capable of complexing with a Cas9 protein. For example, the sequence in the spacer of the ngRNA can comprise nucleotides 5-20, 4-20, 3-20, 2-20, or 1-20 of sequence number 6454, 6455, 7112, 7113, 7115, 7116, or 7117. In some embodiments, the spacer of the ngRNA is a ngRNA spacer listed in Table 41. The ngRNA spacers in Table 41 are annotated with their PAM sequences, enabling selection of an appropriate Cas9 protein. It can be advantageous to select a ngRNA spacer that has a PAM sequence compatible with the Cas9 protein used in the Prime Editor, thus avoiding the need to use two different Cas9 proteins. The ngRNA is capable of directing a complexed Cas9 protein to bind the edit strand of the ATP7B gene; thus, a complexed Cas9 nickase containing a nuclease inactivating mutation in the HNH domain will nick the non-edit strand. A PE3 ngRNA spacer has perfect complementarity to the edit strand both pre- and post-edit; a PE3b ngRNA spacer has perfect complementarity to the edit strand post-edit; and a PE3* spacer has perfect complementarity to the edit strand post-edit with a PEgRNA containing an edit template encoding a PAM silencing mutation. Because some PAMs can be silenced by more than 1 synonymous mutation, edit templates (RTTs) encoding a PAM silencing mutation and ngRNA spacers having 100% complementary with the portion of the edit strand containing the encoded PAM silencing mutation are coded with a number following the asterisk (*).

[0393] Table 42 provides Prime Editing guide RNAs (PEgRNAs) that can be used with any Prime Editor containing a Cas9 protein capable of recognizing a AAG PAM sequence. The PEgRNAs of Table 42 can also be used in Prime Editing systems further comprising a nick guide RNA (ngRNA). Such PEgRNAs and Prime Editing systems can be used, for example, to correct an R778L mutation in ATP7B.

[0394] The PEgRNAs exemplified in Table 42 comprise: (a) a spacer comprising at its 3′ end a sequence corresponding to sequence number 7522; (b) a gRNA core capable of complexing with a Cas9 protein, and (c) an extension arm comprising: (i) an editing template at least 19 nucleotides in length and comprising at its 3′ end a sequence corresponding to any one of sequence numbers 7546-7555, and (ii) a prime binding site (PBS) comprising at its 5′ end a sequence corresponding to sequence number 7529. The PEgRNA spacer can be, for example, 16-22 nucleotides in length and can comprise the sequence corresponding to any one of sequence numbers 7522-7528. In some embodiments, the PEgRNA spacer comprises sequence number 7526. The PEgRNA spacers in Table 42 are annotated with their PAM sequence(s), enabling the selection of an appropriate Cas9 protein. The editing template can be referred to as a reverse transcription template (RTT). The editing template can encode wildtype ATP7B gene sequence. For example, the editing template can comprise at its 3′ end the sequence corresponding to sequence number 7547, 7558, 7574, 7585, 7594, 7605, 7607, 7620, 7632, 7644, 7653, 7659, 7671, 7681, 7686, 7696, 7708, 7716, 7735, 7737, 7754, 7760, 7771, 7778, 7788, 7801, 7806, 7822, 7829, 7840, 7848, 7861, 7875, 7877, 7889, 7900, 7915, 7922, 7932, 7942, 7950, 7962, 7968, 7979, 7987, 7997, 8014, 8022, 8031, 8036, 8050, 8062, 8071, 8078, 8086, 8103, 8106, 8119, 8127, 8139, 8146, 8162, 8171, 8178, 8193, 8201, 8206, 8216, 8233, 8238, 8246, 8262, 8271, 8283, 8294, 8305, 8306, 8321, 8335, 8340, 8353, or 8362. Alternatively, the editing template can encode one or more synonymous mutations relative to the wildtype ATP7B gene. The editing template can encode one or more synonymous mutations that are PAM silencing mutations and can comprise at its 3′ end the sequence corresponding to sequence number 7546, 7548, 7549, 7550, 7551, 7552, 7553, 7554, 7555, 7556, 7557, 7559, 7560, 7561, 7562, 7563, 7564, 7565, 7566, 7567, 7568, 7569, 7570, 7571, 7572, 7573, 7575, 7576, 7577, 7578, 7579, 7580, 7581, 7582, 7583, 7584, 7586, 7587, 7588, 7589, 7590, 7591, 7592, 7593, 7595, 7596, 7597, 7598, 7599, 7600, 7601, 7602, 7603, 7604, 7606, 7608, 7609, 7610, 7611, 7612, 7613, 7614, 7615, 7616, 7617, 7618, 7619, 7621, 7622, 7623, 7624, 7625, 7626, 7627, 7628, 7629, 7630, 7631, 7633, 7634, 7635, 7636, 7637, 7638, 7639, 7640, 7641, 7642, 7643, 7645, 7646, 7647, 7648, 7649, 7650, 7651, 7652, 7654, 7655, 7656, 7657, 7658, 7660, 7661, 7662, 7663, 7664, 7665, 7666, 7667, 7668, 7669, 7670, 7672, 7673, 7674, 7675, 7676, 7677, 7678, 7679, 7680, 7682, 7683, 7684, 7685, 7687, 7688, 7689, 7690, 7691, 7692, 7693, 7694, 7695, 7697, 7698, 7699, 7700, 7701, 7702, 7703, 7704, 7705, 7706, 7707, 7709, 7710, 7711, 7712, 7713, 7714, 7715, 7717, 7718, 7719, 7720, 7721, 7722, 7723, 7724, 7725, 7726, 7727, 7728, 7729, 7730, 7731, 7732, 7733, 7734, 7736, 7738, 7739, 7740, 7741, 7742, 7743, 7744, 7745, 7746, 7747, 7748, 7749, 7750, 7751, 7752, 7753, 7755, 7756, 7757, 7758, 7759, 7761, 7762, 7763, 7764, 7765, 7766, 7767, 7768, 7769, 7770, 7772, 7773, 7774, 7775, 7776, 7777, 7779, 7780, 7781, 7782, 7783, 7784, 7785, 7786, 7787, 7789, 7790, 7791, 7792, 7793, 7794, 7795, 7796, 7797, 7798, 7799, 7800, 7802, 7803, 7804, 7805, 7807, 7808, 7809, 7810, 7811, 7812, 7813, 7814, 7815, 7816, 7817, 7818, 7819, 7820, 7821, 7823, 7824, 7825, 7826, 7827, 7828, 7830, 7831, 7832, 7833, 7834, 7835, 7836, 7837, 7838, 7839, 7841, 7842, 7843, 7844, 7845, 7846, 7847, 7849, 7850, 7851, 7852, 7853, 7854, 7855, 7856, 7857, 7858, 7859, 7860, 7862, 7863, 7864, 7865, 7866, 7867, 7868, 7869, 7870, 7871, 7872, 7873, 7874, 7876, 7878, 7879, 7880, 7881, 7882, 7883, 7884, 7885, 7886, 7887, 7888, 7890, 7891, 7892, 7893, 7894, 7895, 7896, 7897, 7898, 7899, 7901, 7902, 7903, 7904, 7905, 7906, 7907, 7908, 7909, 7910, 7911, 7912, 7913, 7914, 7916, 7917, 7918, 7919, 7920, 7921, 7923, 7924, 7925, 7926, 7927, 7928, 7929, 7930, 7931, 7933, 7934, 7935, 7936, 7937, 7938, 7939, 7940, 7941, 7943, 7944, 7945, 7946, 7947, 7948, 7949, 7951, 7952, 7953, 7954, 7955, 7956, 7957, 7958, 7959, 7960, 7961, 7963, 7964, 7965, 7966, 7967, 7969, 7970, 7971, 7972, 7973, 7974, 7975, 7976, 7977, 7978, 7980, 7981, 7982, 7983, 7984, 7985, 7986, 7988, 7989, 7990, 7991, 7992, 7993, 7994, 7995, 7996, 7998, 7999, 8000, 8001, 8002, 8003, 8004, 8005, 8006, 8007, 8008, 8009, 8010, 8011, 8012, 8013, 8015, 8016, 8017, 8018, 8019, 8020, 8021, 8023, 8024, 8025, 8026, 8027, 8028, 8029, 8030, 8032, 8033, 8034, 8035, 8037, 8038, 8039, 8040, 8041, 8042, 8043, 8044, 8045, 8046, 8047, 8048, 8049, 8051, 8052, 8053, 8054, 8055, 8056, 8057, 8058, 8059, 8060, 8061, 8063, 8064, 8065, 8066, 8067, 8068, 8069, 8070, 8072, 8073, 8074, 8075, 8076, 8077, 8079, 8080, 8081, 8082, 8083, 8084, 8085, 8087, 8088, 8089, 8090, 8091, 8092, 8093, 8094, 8095, 8096, 8097, 8098, 8099, 8100, 8101, 8102, 8104, 8105, 8107, 8108, 8109, 8110, 8111, 8112, 8113, 8114, 8115, 8116, 8117, 8118, 8120, 8121, 8122, 8123, 8124, 8125, 8126, 8128, 8129, 8130, 8131, 8132, 8133, 8134, 8135, 8136, 8137, 8138, 8140, 8141, 8142, 8143, 8144, 8145, 8147, 8148, 8149, 8150, 8151, 8152, 8153, 8154, 8155, 8156, 8157, 8158, 8159, 8160, 8161, 8163, 8164, 8165, 8166, 8167, 8168, 8169, 8170, 8172, 8173, 8174, 8175, 8176, 8177, 8179, 8180, 8181, 8182, 8183, 8184, 8185, 8186, 8187, 8188, 8189, 8190, 8191, 8192, 8194, 8195, 8196, 8197, 8198, 8199, 8200, 8202, 8203, 8204, 8205, 8207, 8208, 8209, 8210, 8211, 8212, 8213, 8214, 8215, 8217, 8218, 8219, 8220, 8221, 8222, 8223, 8224, 8225, 8226, 8227, 8228, 8229, 8230, 8231, 8232, 8234, 8235, 8236, 8237, 8239, 8240, 8241, 8242, 8243, 8244, 8245, 8247, 8248, 8249, 8250, 8251, 8252, 8253, 8254, 8255, 8256, 8257, 8258, 8259, 8260, 8261, 8263, 8264, 8265, 8266, 8267, 8268, 8269, 8270, 8272, 8273, 8274, 8275, 8276, 8277, 8278, 8279, 8280, 8281, 8282, 8284, 8285, 8286, 8287, 8288, 8289, 8290, 8291, 8292, 8293, 8295, 8296, 8297, 8298, 8299, 8300, 8301, 8302, 8303, 8304, 8307, 8308, 8309, 8310, 8311, 8312, 8313, 8314, 8315, 8316, 8317, 8318, 8319, 8320, 8322, 8323, 8324, 8325, 8326, 8327, 8328, 8329, 8330, 8331, 8332, 8333, 8334, 8336, 8337, 8338, 8339, 8341, 8342, 8343, 8344, 8345, 8346, 8347, 8348, 8349, 8350, 8351, 8352, 8354, 8355, 8356, 8357, 8358, 8359, 8360, 8361, 8363, 8364, or 8365. The PBS can be, for example, 3 to 19 nucleotides in length and can comprise the sequence corresponding to any one of sequence numbers 7529-7545. In some cases, a PBS length of no more than 3 nucleotides less than the PEgRNA spacer length is chosen.

[0395] Any of the PEgRNAs of Table 42 can be used in a Prime Editing system further comprising a nick guide RNA (ngRNA). Such ngRNA can comprise a spacer comprising at its 3′ end a sequence corresponding to nucleotides 5-20 of any ngRNA spacer listed in Table 42 and a gRNA core capable of complexing with a Cas9 protein. For example, the sequence in the spacer of the ngRNA can comprise nucleotides 5-20, 4-20, 3-20, 2-20, or 1-20 of sequence number 6454, 6455, 7112, 8366, 8367, 8368, 8369, 8370, 8371, 8372, 8373, 8374, 8375, 8376, 8377, 8378, 8379, 8380, or 8381. In some embodiments, the spacer of the ngRNA is a ngRNA spacer listed in Table 42. The ngRNA spacers in Table 42 are annotated with their PAM sequences, enabling selection of an appropriate Cas9 protein. It can be advantageous to select a ngRNA spacer that has a PAM sequence compatible with the Cas9 protein used in the Prime Editor, thus avoiding the need to use two different Cas9 proteins. The ngRNA is capable of directing a complexed Cas9 protein to bind the edit strand of the ATP7B gene; thus, a complexed Cas9 nickase containing a nuclease inactivating mutation in the HNH domain will nick the non-edit strand. A PE3 ngRNA spacer has perfect complementarity to the edit strand both pre- and post-edit; a PE3b ngRNA spacer has perfect complementarity to the edit strand post-edit; and a PE3* spacer has perfect complementarity to the edit strand post-edit with a PEgRNA containing an edit template encoding a PAM silencing mutation. Because some PAMs can be silenced by more than 1 synonymous mutation, edit templates (RTTs) encoding a PAM silencing mutation and ngRNA spacers having 100% complementary with the portion of the edit strand containing the encoded PAM silencing mutation are coded with a number following the asterisk (*).

[0396] Table 43 provides Prime Editing guide RNAs (PEgRNAs) that can be used with any Prime Editor containing a Cas9 protein capable of recognizing a CAG PAM sequence. The PEgRNAs of Table 43 can also be used in Prime Editing systems further comprising a nick guide RNA (ngRNA). Such PEgRNAs and Prime Editing systems can be used, for example, to correct an R778L mutation in ATP7B.

[0397] The PEgRNAs exemplified in Table 43 comprise: (a) a spacer comprising at its 3′ end a sequence corresponding to sequence number 8382; (b) a gRNA core capable of complexing with a Cas9 protein, and (c) an extension arm comprising: (i) an editing template at least 11 nucleotides in length and comprising at its 3′ end a sequence corresponding to any one of sequence numbers 8405-8407, and (ii) a prime binding site (PBS) comprising at its 5′ end a sequence corresponding to sequence number 5929. The PEgRNA spacer can be, for example, 16-22 nucleotides in length and can comprise the sequence corresponding to any one of sequence numbers 8382-8388. In some embodiments, the PEgRNA spacer comprises sequence number 8386. The PEgRNA spacers in Table 43 are annotated with their PAM sequence(s), enabling the selection of an appropriate Cas9 protein. The editing template can be referred to as a reverse transcription template (RTT). The editing template can encode wildtype ATP7B gene sequence. For example, the editing template can comprise at its 3′ end the sequence corresponding to sequence number 8406, 8409, 8412, 8416, 8417, 8421, 8425, 8427, 8430, 8432, 8436, 8438, 8441, 8445, 8449, 8452, 8455, 8457, 8460, 8464, 8465, 8469, 8473, 8475, 8479, 8482, 8485, 8487, 8491, 8494, 8496, 8499, 8502, 8506, 8509, 8510, 8514, 8517, 8520, 8522, 8527, 8530, 8533, 8536, 8538, 8541, 8544, 8547, 8550, 8553, 8555, 8559, 8563, 8564, 8567, 8571, 8575, 8576, 8580, 8583, 8585, 8590, 8592, 8596, 8597, 8602, 8605, 8606, 8611, 8613, 8617, 8619, 8621, 8626, 8627, 8630, 8635, 8637, 8639, 8643, 8646, 8649, 8651, 8655, 8657, 8661, 8664, 8668, 8669, or 8672. Alternatively, the editing template can encode one or more synonymous mutations relative to the wildtype ATP7B gene. The editing template can encode one or more synonymous mutations that are PAM silencing mutations and can comprise at its 3′ end the sequence corresponding to sequence number 8405, 8407, 8408, 8410, 8411, 8413, 8414, 8415, 8418, 8419, 8420, 8422, 8423, 8424, 8426, 8428, 8429, 8431, 8433, 8434, 8435, 8437, 8439, 8440, 8442, 8443, 8444, 8446, 8447, 8448, 8450, 8451, 8453, 8454, 8456, 8458, 8459, 8461, 8462, 8463, 8466, 8467, 8468, 8470, 8471, 8472, 8474, 8476, 8477, 8478, 8480, 8481, 8483, 8484, 8486, 8488, 8489, 8490, 8492, 8493, 8495, 8497, 8498, 8500, 8501, 8503, 8504, 8505, 8507, 8508, 8511, 8512, 8513, 8515, 8516, 8518, 8519, 8521, 8523, 8524, 8525, 8526, 8528, 8529, 8531, 8532, 8534, 8535, 8537, 8539, 8540, 8542, 8543, 8545, 8546, 8548, 8549, 8551, 8552, 8554, 8556, 8557, 8558, 8560, 8561, 8562, 8565, 8566, 8568, 8569, 8570, 8572, 8573, 8574, 8577, 8578, 8579, 8581, 8582, 8584, 8586, 8587, 8588, 8589, 8591, 8593, 8594, 8595, 8598, 8599, 8600, 8601, 8603, 8604, 8607, 8608, 8609, 8610, 8612, 8614, 8615, 8616, 8618, 8620, 8622, 8623, 8624, 8625, 8628, 8629, 8631, 8632, 8633, 8634, 8636, 8638, 8640, 8641, 8642, 8644, 8645, 8647, 8648, 8650, 8652, 8653, 8654, 8656, 8658, 8659, 8660, 8662, 8663, 8665, 8666, 8667, 8670, 8671, 8673, or 8674. The PBS can be, for example, 3 to 19 nucleotides in length and can comprise the sequence corresponding to sequence number 5929, 8389, 8390, 8391, 8392, 8393, 8394, 8395, 8396, 8397, 8398, 8399, 8400, 8401, 8402, 8403, or 8404. In some cases, a PBS length of no more than 3 nucleotides less than the PEgRNA spacer length is chosen.

[0398] Any of the PEgRNAs of Table 43 can be used in a Prime Editing system further comprising a nick guide RNA (ngRNA). Such ngRNA can comprise a spacer comprising at its 3′ end a sequence corresponding to nucleotides 5-20 of any ngRNA spacer listed in Table 43 and a gRNA core capable of complexing with a Cas9 protein. For example, the sequence in the spacer of the ngRNA can comprise nucleotides 5-20, 4-20, 3-20, 2-20, or 1-20 of sequence number 6454, 6455, 8373, 8374, 8376, 8377, 8380, or 8675. In some embodiments, the spacer of the ngRNA is a ngRNA spacer listed in Table 43. The ngRNA spacers in Table 43 are annotated with their PAM sequences, enabling selection of an appropriate Cas9 protein. It can be advantageous to select a ngRNA spacer that has a PAM sequence compatible with the Cas9 protein used in the Prime Editor, thus avoiding the need to use two different Cas9 proteins. The ngRNA is capable of directing a complexed Cas9 protein to bind the edit strand of the ATP7B gene; thus, a complexed Cas9 nickase containing a nuclease inactivating mutation in the HNH domain will nick the non-edit strand. A PE3 ngRNA spacer has perfect complementarity to the edit strand both pre- and post-edit; a PE3b ngRNA spacer has perfect complementarity to the edit strand post-edit; and a PE3* spacer has perfect complementarity to the edit strand post-edit with a PEgRNA containing an edit template encoding a PAM silencing mutation. Because some PAMs can be silenced by more than 1 synonymous mutation, edit templates (RTTs) encoding a PAM silencing mutation and ngRNA spacers having 100% complementary with the portion of the edit strand containing the encoded PAM silencing mutation are coded with a number following the asterisk (*).

[0399] Table 44 provides Prime Editing guide RNAs (PEgRNAs) that can be used with any Prime Editor containing a Cas9 protein capable of recognizing a CAG or CAGG PAM sequence. The PEgRNAs of Table 44 can also be used in Prime Editing systems further comprising a nick guide RNA (ngRNA). Such PEgRNAs and Prime Editing systems can be used, for example, to correct an R778L mutation in ATP7B.

[0400] The PEgRNAs exemplified in Table 44 comprise: (a) a spacer comprising at its 3′ end a sequence corresponding to sequence number 8676; (b) a gRNA core capable of complexing with a Cas9 protein, and (c) an extension arm comprising: (i) an editing template at least 10 nucleotides in length and comprising at its 3′ end a sequence corresponding to any one of sequence numbers 8699-8710, and (ii) a prime binding site (PBS) comprising at its 5′ end a sequence corresponding to sequence number 7167. The PEgRNA spacer can be, for example, 16-22 nucleotides in length and can comprise the sequence corresponding to any one of sequence numbers 8676-8682. In some embodiments, the PEgRNA spacer comprises sequence number 8680. The PEgRNA spacers in Table 44 are annotated with their PAM sequence(s), enabling the selection of an appropriate Cas9 protein. The editing template can be referred to as a reverse transcription template (RTT). The editing template can encode wildtype ATP7B gene sequence. For example, the editing template can comprise at its 3′ end the sequence corresponding to sequence number 8710, 8718, 8730, 8743, 8752, 8764, 8780, 8794, 8796, 8815, 8828, 8840, 8850, 8857, 8874, 8883, 8893, 8910, 8918, 8935, 8946, 8958, 8964, 8979, 8993, 9007, 9015, 9033, 9045, 9048, 9060, 9073, 9092, 9095, 9108, 9124, 9136, 9144, 9163, 9177, 9183, 9198, 9207, 9223, 9233, 9249, 9252, 9267, 9282, 9289, 9299, 9314, 9325, 9342, 9357, 9369, 9380, 9383, 9403, 9409, 9420, 9435, 9443, 9460, 9467, 9485, 9496, 9506, 9519, 9538, 9546, 9562, 9563, 9576, 9593, 9604, 9611, 9632, 9643, 9657, 9665, 9676, 9687, 9702, 9709, 9730, 9740, 9748, 9763, 9768, or 9779. Alternatively, the editing template can encode one or more synonymous mutations relative to the wildtype ATP7B gene. The editing template can encode one or more synonymous mutations that are PAM silencing mutations and can comprise at its 3′ end the sequence corresponding to sequence number 8699, 8700, 8701, 8702, 8703, 8704, 8705, 8706, 8707, 8708, 8709, 8711, 8712, 8713, 8714, 8715, 8716, 8717, 8719, 8720, 8721, 8722, 8723, 8724, 8725, 8726, 8727, 8728, 8729, 8731, 8732, 8733, 8734, 8735, 8736, 8737, 8738, 8739, 8740, 8741, 8742, 8744, 8745, 8746, 8747, 8748, 8749, 8750, 8751, 8753, 8754, 8755, 8756, 8757, 8758, 8759, 8760, 8761, 8762, 8763, 8765, 8766, 8767, 8768, 8769, 8770, 8771, 8772, 8773, 8774, 8775, 8776, 8777, 8778, 8779, 8781, 8782, 8783, 8784, 8785, 8786, 8787, 8788, 8789, 8790, 8791, 8792, 8793, 8795, 8797, 8798, 8799, 8800, 8801, 8802, 8803, 8804, 8805, 8806, 8807, 8808, 8809, 8810, 8811, 8812, 8813, 8814, 8816, 8817, 8818, 8819, 8820, 8821, 8822, 8823, 8824, 8825, 8826, 8827, 8829, 8830, 8831, 8832, 8833, 8834, 8835, 8836, 8837, 8838, 8839, 8841, 8842, 8843, 8844, 8845, 8846, 8847, 8848, 8849, 8851, 8852, 8853, 8854, 8855, 8856, 8858, 8859, 8860, 8861, 8862, 8863, 8864, 8865, 8866, 8867, 8868, 8869, 8870, 8871, 8872, 8873, 8875, 8876, 8877, 8878, 8879, 8880, 8881, 8882, 8884, 8885, 8886, 8887, 8888, 8889, 8890, 8891, 8892, 8894, 8895, 8896, 8897, 8898, 8899, 8900, 8901, 8902, 8903, 8904, 8905, 8906, 8907, 8908, 8909, 8911, 8912, 8913, 8914, 8915, 8916, 8917, 8919, 8920, 8921, 8922, 8923, 8924, 8925, 8926, 8927, 8928, 8929, 8930, 8931, 8932, 8933, 8934, 8936, 8937, 8938, 8939, 8940, 8941, 8942, 8943, 8944, 8945, 8947, 8948, 8949, 8950, 8951, 8952, 8953, 8954, 8955, 8956, 8957, 8959, 8960, 8961, 8962, 8963, 8965, 8966, 8967, 8968, 8969, 8970, 8971, 8972, 8973, 8974, 8975, 8976, 8977, 8978, 8980, 8981, 8982, 8983, 8984, 8985, 8986, 8987, 8988, 8989, 8990, 8991, 8992, 8994, 8995, 8996, 8997, 8998, 8999, 9000, 9001, 9002, 9003, 9004, 9005, 9006, 9008, 9009, 9010, 9011, 9012, 9013, 9014, 9016, 9017, 9018, 9019, 9020, 9021, 9022, 9023, 9024, 9025, 9026, 9027, 9028, 9029, 9030, 9031, 9032, 9034, 9035, 9036, 9037, 9038, 9039, 9040, 9041, 9042, 9043, 9044, 9046, 9047, 9049, 9050, 9051, 9052, 9053, 9054, 9055, 9056, 9057, 9058, 9059, 9061, 9062, 9063, 9064, 9065, 9066, 9067, 9068, 9069, 9070, 9071, 9072, 9074, 9075, 9076, 9077, 9078, 9079, 9080, 9081, 9082, 9083, 9084, 9085, 9086, 9087, 9088, 9089, 9090, 9091, 9093, 9094, 9096, 9097, 9098, 9099, 9100, 9101, 9102, 9103, 9104, 9105, 9106, 9107, 9109, 9110, 9111, 9112, 9113, 9114, 9115, 9116, 9117, 9118, 9119, 9120, 9121, 9122, 9123, 9125, 9126, 9127, 9128, 9129, 9130, 9131, 9132, 9133, 9134, 9135, 9137, 9138, 9139, 9140, 9141, 9142, 9143, 9145, 9146, 9147, 9148, 9149, 9150, 9151, 9152, 9153, 9154, 9155, 9156, 9157, 9158, 9159, 9160, 9161, 9162, 9164, 9165, 9166, 9167, 9168, 9169, 9170, 9171, 9172, 9173, 9174, 9175, 9176, 9178, 9179, 9180, 9181, 9182, 9184, 9185, 9186, 9187, 9188, 9189, 9190, 9191, 9192, 9193, 9194, 9195, 9196, 9197, 9199, 9200, 9201, 9202, 9203, 9204, 9205, 9206, 9208, 9209, 9210, 9211, 9212, 9213, 9214, 9215, 9216, 9217, 9218, 9219, 9220, 9221, 9222, 9224, 9225, 9226, 9227, 9228, 9229, 9230, 9231, 9232, 9234, 9235, 9236, 9237, 9238, 9239, 9240, 9241, 9242, 9243, 9244, 9245, 9246, 9247, 9248, 9250, 9251, 9253, 9254, 9255, 9256, 9257, 9258, 9259, 9260, 9261, 9262, 9263, 9264, 9265, 9266, 9268, 9269, 9270, 9271, 9272, 9273, 9274, 9275, 9276, 9277, 9278, 9279, 9280, 9281, 9283, 9284, 9285, 9286, 9287, 9288, 9290, 9291, 9292, 9293, 9294, 9295, 9296, 9297, 9298, 9300, 9301, 9302, 9303, 9304, 9305, 9306, 9307, 9308, 9309, 9310, 9311, 9312, 9313, 9315, 9316, 9317, 9318, 9319, 9320, 9321, 9322, 9323, 9324, 9326, 9327, 9328, 9329, 9330, 9331, 9332, 9333, 9334, 9335, 9336, 9337, 9338, 9339, 9340, 9341, 9343, 9344, 9345, 9346, 9347, 9348, 9349, 9350, 9351, 9352, 9353, 9354, 9355, 9356, 9358, 9359, 9360, 9361, 9362, 9363, 9364, 9365, 9366, 9367, 9368, 9370, 9371, 9372, 9373, 9374, 9375, 9376, 9377, 9378, 9379, 9381, 9382, 9384, 9385, 9386, 9387, 9388, 9389, 9390, 9391, 9392, 9393, 9394, 9395, 9396, 9397, 9398, 9399, 9400, 9401, 9402, 9404, 9405, 9406, 9407, 9408, 9410, 9411, 9412, 9413, 9414, 9415, 9416, 9417, 9418, 9419, 9421, 9422, 9423, 9424, 9425, 9426, 9427, 9428, 9429, 9430, 9431, 9432, 9433, 9434, 9436, 9437, 9438, 9439, 9440, 9441, 9442, 9444, 9445, 9446, 9447, 9448, 9449, 9450, 9451, 9452, 9453, 9454, 9455, 9456, 9457, 9458, 9459, 9461, 9462, 9463, 9464, 9465, 9466, 9468, 9469, 9470, 9471, 9472, 9473, 9474, 9475, 9476, 9477, 9478, 9479, 9480, 9481, 9482, 9483, 9484, 9486, 9487, 9488, 9489, 9490, 9491, 9492, 9493, 9494, 9495, 9497, 9498, 9499, 9500, 9501, 9502, 9503, 9504, 9505, 9507, 9508, 9509, 9510, 9511, 9512, 9513, 9514, 9515, 9516, 9517, 9518, 9520, 9521, 9522, 9523, 9524, 9525, 9526, 9527, 9528, 9529, 9530, 9531, 9532, 9533, 9534, 9535, 9536, 9537, 9539, 9540, 9541, 9542, 9543, 9544, 9545, 9547, 9548, 9549, 9550, 9551, 9552, 9553, 9554, 9555, 9556, 9557, 9558, 9559, 9560, 9561, 9564, 9565, 9566, 9567, 9568, 9569, 9570, 9571, 9572, 9573, 9574, 9575, 9577, 9578, 9579, 9580, 9581, 9582, 9583, 9584, 9585, 9586, 9587, 9588, 9589, 9590, 9591, 9592, 9594, 9595, 9596, 9597, 9598, 9599, 9600, 9601, 9602, 9603, 9605, 9606, 9607, 9608, 9609, 9610, 9612, 9613, 9614, 9615, 9616, 9617, 9618, 9619, 9620, 9621, 9622, 9623, 9624, 9625, 9626, 9627, 9628, 9629, 9630, 9631, 9633, 9634, 9635, 9636, 9637, 9638, 9639, 9640, 9641, 9642, 9644, 9645, 9646, 9647, 9648, 9649, 9650, 9651, 9652, 9653, 9654, 9655, 9656, 9658, 9659, 9660, 9661, 9662, 9663, 9664, 9666, 9667, 9668, 9669, 9670, 9671, 9672, 9673, 9674, 9675, 9677, 9678, 9679, 9680, 9681, 9682, 9683, 9684, 9685, 9686, 9688, 9689, 9690, 9691, 9692, 9693, 9694, 9695, 9696, 9697, 9698, 9699, 9700, 9701, 9703, 9704, 9705, 9706, 9707, 9708, 9710, 9711, 9712, 9713, 9714, 9715, 9716, 9717, 9718, 9719, 9720, 9721, 9722, 9723, 9724, 9725, 9726, 9727, 9728, 9729, 9731, 9732, 9733, 9734, 9735, 9736, 9737, 9738, 9739, 9741, 9742, 9743, 9744, 9745, 9746, 9747, 9749, 9750, 9751, 9752, 9753, 9754, 9755, 9756, 9757, 9758, 9759, 9760, 9761, 9762, 9764, 9765, 9766, 9767, 9769, 9770, 9771, 9772, 9773, 9774, 9775, 9776, 9777, 9778, 9780, 9781, 9782, 9783, 9784, 9785, 9786, 9787, 9788, 9789, or 9790. The PBS can be, for example, 3 to 19 nucleotides in length and can comprise the sequence corresponding to sequence number 7167, 8683, 8684, 8685, 8686, 8687, 8688, 8689, 8690, 8691, 8692, 8693, 8694, 8695, 8696, 8697, or 8698. In some cases, a PBS length of no more than 3 nucleotides less than the PEgRNA spacer length is chosen.

[0401] Any of the PEgRNAs of Table 44 can be used in a Prime Editing system further comprising a nick guide RNA (ngRNA). Such ngRNA can comprise a spacer comprising at its 3′ end a sequence corresponding to nucleotides 5-20 of any ngRNA spacer listed in Table 44 and a gRNA core capable of complexing with a Cas9 protein. For example, the sequence in the spacer of the ngRNA can comprise nucleotides 5-20, 4-20, 3-20, 2-20, or 1-20 of sequence number 2056, 6454, 6455, 7156, 7157, 7158, 8373, 8374, 8376, 8377, 8380, 9791, 9792, 9793, 9794, 9795, 9796, 9797, 9798, 9799, 9800, 9801, 9802, 9803, 9804, 9805, 9806, 9807, 9808, 9809, 9810, 9811, or 9812. In some embodiments, the spacer of the ngRNA is a ngRNA spacer listed in Table 44. The ngRNA spacers in Table 44 are annotated with their PAM sequences, enabling selection of an appropriate Cas9 protein. It can be advantageous to select a ngRNA spacer that has a PAM sequence compatible with the Cas9 protein used in the Prime Editor, thus avoiding the need to use two different Cas9 proteins. The ngRNA is capable of directing a complexed Cas9 protein to bind the edit strand of the ATP7B gene; thus, a complexed Cas9 nickase containing a nuclease inactivating mutation in the HNH domain will nick the non-edit strand. A PE3 ngRNA spacer has perfect complementarity to the edit strand both pre- and post-edit; a PE3b ngRNA spacer has perfect complementarity to the edit strand post-edit; and a PE3* spacer has perfect complementarity to the edit strand post-edit with a PEgRNA containing an edit template encoding a PAM silencing mutation. Because some PAMs can be silenced by more than 1 synonymous mutation, edit templates (RTTs) encoding a PAM silencing mutation and ngRNA spacers having 100% complementary with the portion of the edit strand containing the encoded PAM silencing mutation are coded with a number following the asterisk (*). Exemplary ngRNA provided in Table 44 can comprise a sequence corresponding to sequence number 2061.

[0402] Table 45 provides Prime Editing guide RNAs (PEgRNAs) that can be used with any Prime Editor containing a Cas9 protein capable of recognizing a GG or GGTGGT PAM sequence. The PEgRNAs of Table 45 can also be used in Prime Editing systems further comprising a nick guide RNA (ngRNA). Such PEgRNAs and Prime Editing systems can be used, for example, to correct an R778L mutation in ATP7B.

[0403] The PEgRNAs exemplified in Table 45 comprise: (a) a spacer comprising at its 3′ end a sequence corresponding to sequence number 9813; (b) a gRNA core capable of complexing with a Cas9 protein, and (c) an extension arm comprising: (i) an editing template at least 93 nucleotides in length and comprising at its 3′ end a sequence corresponding to any one of sequence numbers 9837-9839, and (ii) a prime binding site (PBS) comprising at its 5′ end a sequence corresponding to sequence number 9820. The PEgRNA spacer can be, for example, 16-22 nucleotides in length and can comprise the sequence corresponding to any one of sequence numbers 9813-9819. In some embodiments, the PEgRNA spacer comprises sequence number 9817. The PEgRNA spacers in Table 45 are annotated with their PAM sequence(s), enabling the selection of an appropriate Cas9 protein. The editing template can be referred to as a reverse transcription template (RTT). The editing template can encode wildtype ATP7B gene sequence. For example, the editing template can comprise at its 3′ end the sequence corresponding to sequence number 9839, 9840, 9843, 9846, 9850, 9852, 9857, or 9859. Alternatively, the editing template can encode one or more synonymous mutations relative to the wildtype ATP7B gene. The editing template can encode one or more synonymous mutations that are PAM silencing mutations and can comprise at its 3′ end the sequence corresponding to sequence number 9837, 9838, 9841, 9842, 9844, 9845, 9847, 9848, 9849, 9851, 9853, 9854, 9855, 9856, 9858, or 9860. The PBS can be, for example, 3 to 19 nucleotides in length and can comprise the sequence corresponding to any one of sequence numbers 9820-9836. In some cases, a PBS length of no more than 3 nucleotides less than the PEgRNA spacer length is chosen.

[0404] Any of the PEgRNAs of Table 45 can be used in a Prime Editing system further comprising a nick guide RNA (ngRNA). Such ngRNA can comprise a spacer comprising at its 3′ end a sequence corresponding to nucleotides 5-20 of any ngRNA spacer listed in Table 45 and a gRNA core capable of complexing with a Cas9 protein. For example, the sequence in the spacer of the ngRNA can comprise nucleotides 5-20, 4-20, 3-20, 2-20, or 1-20 of sequence number 60, 61, 62, 64, 65, 67, 68, 69, 70, 71, 72, 75, 76, 77, 78, 79, 81, 84, 85, 90, 91, 92, 93, 95, 96, 97, 98, 99, 6453, 6455, 9861, or 9862. In some embodiments, the spacer of the ngRNA is a ngRNA spacer listed in Table 45. The ngRNA spacers in Table 45 are annotated with their PAM sequences, enabling selection of an appropriate Cas9 protein. It can be advantageous to select a ngRNA spacer that has a PAM sequence compatible with the Cas9 protein used in the Prime Editor, thus avoiding the need to use two different Cas9 proteins. The ngRNA is capable of directing a complexed Cas9 protein to bind the edit strand of the ATP7B gene; thus, a complexed Cas9 nickase containing a nuclease inactivating mutation in the HNH domain will nick the non-edit strand. A PE3 ngRNA spacer has perfect complementarity to the edit strand both pre- and post-edit; a PE3b ngRNA spacer has perfect complementarity to the edit strand post-edit; and a PE3* spacer has perfect complementarity to the edit strand post-edit with a PEgRNA containing an edit template encoding a PAM silencing mutation. Because some PAMs can be silenced by more than 1 synonymous mutation, edit templates (RTTs) encoding a PAM silencing mutation and ngRNA spacers having 100% complementary with the portion of the edit strand containing the encoded PAM silencing mutation are coded with a number following the asterisk (*). Exemplary ngRNA provided in Table 45 can comprise a sequence corresponding to sequence number 100, 101, 102, 103, 104, 105, 106, 107, 108, 109, 110, 111, 112, 113, 114, 117, or 118.

[0405] Table 46 provides Prime Editing guide RNAs (PEgRNAs) that can be used with any Prime Editor containing a Cas9 protein capable of recognizing a GG PAM sequence. The PEgRNAs of Table 46 can also be used in Prime Editing systems further comprising a nick guide RNA (ngRNA). Such PEgRNAs and Prime Editing systems can be used, for example, to correct an R778L mutation in ATP7B.

[0406] The PEgRNAs exemplified in Table 46 comprise: (a) a spacer comprising at its 3′ end a sequence corresponding to sequence number 9863; (b) a gRNA core capable of complexing with a Cas9 protein, and (c) an extension arm comprising: (i) an editing template at least 90 nucleotides in length and comprising at its 3′ end a sequence corresponding to sequence number 9887, and (ii) a prime binding site (PBS) comprising at its 5′ end a sequence corresponding to sequence number 9870. The PEgRNA spacer can be, for example, 16-22 nucleotides in length and can comprise the sequence corresponding to any one of sequence numbers 9863-9869. In some embodiments, the PEgRNA spacer comprises sequence number 9867. The PEgRNA spacers in Table 46 are annotated with their PAM sequence(s), enabling the selection of an appropriate Cas9 protein. The editing template can be referred to as a reverse transcription template (RTT). The editing template can encode wildtype ATP7B gene sequence. For example, the editing template can comprise at its 3′ end the sequence corresponding to any one of sequence numbers 9887-9897. Alternatively, the editing template can encode one or more synonymous mutations relative to the wildtype ATP7B gene. The PBS can be, for example, 3 to 19 nucleotides in length and can comprise the sequence corresponding to any one of sequence numbers 9870-9886. In some cases, a PBS length of no more than 3 nucleotides less than the PEgRNA spacer length is chosen.

[0407] Any of the PEgRNAs of Table 46 can be used in a Prime Editing system further comprising a nick guide RNA (ngRNA). Such ngRNA can comprise a spacer comprising at its 3′ end a sequence corresponding to nucleotides 5-20 of any ngRNA spacer listed in Table 46 and a gRNA core capable of complexing with a Cas9 protein. For example, the sequence in the spacer of the ngRNA can comprise nucleotides 5-20, 4-20, 3-20, 2-20, or 1-20 of sequence number 60, 61, 62, 64, 65, 67, 68, 69, 70, 71, 72, 76, 77, 78, 79, 81, 84, 85, 90, 91, 92, 93, 95, 96, 97, 98, 99, or 189. In some embodiments, the spacer of the ngRNA is a ngRNA spacer listed in Table 46. The ngRNA spacers in Table 46 are annotated with their PAM sequences, enabling selection of an appropriate Cas9 protein. It can be advantageous to select a ngRNA spacer that has a PAM sequence compatible with the Cas9 protein used in the Prime Editor, thus avoiding the need to use two different Cas9 proteins. The ngRNA is capable of directing a complexed Cas9 protein to bind the edit strand of the ATP7B gene; thus, a complexed Cas9 nickase containing a nuclease inactivating mutation in the HNH domain will nick the non-edit strand. A PE3 ngRNA spacer has perfect complementarity to the edit strand both pre- and post-edit; a PE3b ngRNA spacer has perfect complementarity to the edit strand post-edit; and a PE3* spacer has perfect complementarity to the edit strand post-edit with a PEgRNA containing an edit template encoding a PAM silencing mutation. Because some PAMs can be silenced by more than 1 synonymous mutation, edit templates (RTTs) encoding a PAM silencing mutation and ngRNA spacers having 100% complementary with the portion of the edit strand containing the encoded PAM silencing mutation are coded with a number following the asterisk (*). Exemplary ngRNA provided in Table 46 can comprise a sequence corresponding to sequence number 100, 101, 102, 103, 104, 105, 106, 107, 108, 109, 110, 111, 112, 113, 114, 117, or 118.

[0408] Table 47 provides Prime Editing guide RNAs (PEgRNAs) that can be used with any Prime Editor containing a Cas9 protein capable of recognizing a TG PAM sequence. The PEgRNAs of Table 47 can also be used in Prime Editing systems further comprising a nick guide RNA (ngRNA). Such PEgRNAs and Prime Editing systems can be used, for example, to correct an R778L mutation in ATP7B.

[0409] The PEgRNAs exemplified in Table 47 comprise: (a) a spacer comprising at its 3′ end a sequence corresponding to sequence number 9898; (b) a gRNA core capable of complexing with a Cas9 protein, and (c) an extension arm comprising: (i) an editing template at least 87 nucleotides in length and comprising at its 3′ end a sequence corresponding to sequence number 9920, and (ii) a prime binding site (PBS) comprising at its 5′ end a sequence corresponding to sequence number 7082. The PEgRNA spacer can be, for example, 16-22 nucleotides in length and can comprise the sequence corresponding to any one of sequence numbers 9898-9904. In some embodiments, the PEgRNA spacer comprises sequence number 9902. The PEgRNA spacers in Table 47 are annotated with their PAM sequence(s), enabling the selection of an appropriate Cas9 protein. The editing template can be referred to as a reverse transcription template (RTT). The editing template can encode wildtype ATP7B gene sequence. For example, the editing template can comprise at its 3′ end the sequence corresponding to any one of sequence numbers 9920-9933. Alternatively, the editing template can encode one or more synonymous mutations relative to the wildtype ATP7B gene. The PBS can be, for example, 3 to 19 nucleotides in length and can comprise the sequence corresponding to sequence number 7082, 7083, 9905, 9906, 9907, 9908, 9909, 9910, 9911, 9912, 9913, 9914, 9915, 9916, 9917, 9918, or 9919. In some cases, a PBS length of no more than 3 nucleotides less than the PEgRNA spacer length is chosen.

[0410] Any of the PEgRNAs of Table 47 can be used in a Prime Editing system further comprising a nick guide RNA (ngRNA). Such ngRNA can comprise a spacer comprising at its 3′ end a sequence corresponding to nucleotides 5-20 of any ngRNA spacer listed in Table 47 and a gRNA core capable of complexing with a Cas9 protein. For example, the sequence in the spacer of the ngRNA can comprise nucleotides 5-20, 4-20, 3-20, 2-20, or 1-20 of sequence number 60, 61, 62, 64, 65, 67, 68, 69, 70, 72, 76, 77, 78, 79, 81, 84, 85, 90, 91, 92, 93, 95, 96, 97, 98, 99, or 189. In some embodiments, the spacer of the ngRNA is a ngRNA spacer listed in Table 47. The ngRNA spacers in Table 47 are annotated with their PAM sequences, enabling selection of an appropriate Cas9 protein. It can be advantageous to select a ngRNA spacer that has a PAM sequence compatible with the Cas9 protein used in the Prime Editor, thus avoiding the need to use two different Cas9 proteins. The ngRNA is capable of directing a complexed Cas9 protein to bind the edit strand of the ATP7B gene; thus, a complexed Cas9 nickase containing a nuclease inactivating mutation in the HNH domain will nick the non-edit strand. A PE3 ngRNA spacer has perfect complementarity to the edit strand both pre- and post-edit; a PE3b ngRNA spacer has perfect complementarity to the edit strand post-edit; and a PE3* spacer has perfect complementarity to the edit strand post-edit with a PEgRNA containing an edit template encoding a PAM silencing mutation. Because some PAMs can be silenced by more than 1 synonymous mutation, edit templates (RTTs) encoding a PAM silencing mutation and ngRNA spacers having 100% complementary with the portion of the edit strand containing the encoded PAM silencing mutation are coded with a number following the asterisk (*). Exemplary ngRNA provided in Table 47 can comprise a sequence corresponding to sequence number 100, 101, 102, 103, 104, 105, 106, 107, 108, 109, 110, 111, 112, 113, 114, 117, or 118.

[0411] Table 48 provides Prime Editing guide RNAs (PEgRNAs) that can be used with any Prime Editor containing a Cas9 protein capable of recognizing a TG PAM sequence. The PEgRNAs of Table 48 can also be used in Prime Editing systems further comprising a nick guide RNA (ngRNA). Such PEgRNAs and Prime Editing systems can be used, for example, to correct an R778L mutation in ATP7B.

[0412] The PEgRNAs exemplified in Table 48 comprise: (a) a spacer comprising at its 3′ end a sequence corresponding to sequence number 9934; (b) a gRNA core capable of complexing with a Cas9 protein, and (c) an extension arm comprising: (i) an editing template at least 84 nucleotides in length and comprising at its 3′ end a sequence corresponding to sequence number 9956, and (ii) a prime binding site (PBS) comprising at its 5′ end a sequence corresponding to sequence number 7082. The PEgRNA spacer can be, for example, 16-22 nucleotides in length and can comprise the sequence corresponding to any one of sequence numbers 9934-9940. In some embodiments, the PEgRNA spacer comprises sequence number 9938. The PEgRNA spacers in Table 48 are annotated with their PAM sequence(s), enabling the selection of an appropriate Cas9 protein. The editing template can be referred to as a reverse transcription template (RTT). The editing template can encode wildtype ATP7B gene sequence. For example, the editing template can comprise at its 3′ end the sequence corresponding to any one of sequence numbers 9956-9972. Alternatively, the editing template can encode one or more synonymous mutations relative to the wildtype ATP7B gene. The PBS can be, for example, 3 to 19 nucleotides in length and can comprise the sequence corresponding to sequence number 7082, 7083, 9941, 9942, 9943, 9944, 9945, 9946, 9947, 9948, 9949, 9950, 9951, 9952, 9953, 9954, or 9955. In some cases, a PBS length of no more than 3 nucleotides less than the PEgRNA spacer length is chosen.

[0413] Any of the PEgRNAs of Table 48 can be used in a Prime Editing system further comprising a nick guide RNA (ngRNA). Such ngRNA can comprise a spacer comprising at its 3′ end a sequence corresponding to nucleotides 5-20 of any ngRNA spacer listed in Table 48 and a gRNA core capable of complexing with a Cas9 protein. For example, the sequence in the spacer of the ngRNA can comprise nucleotides 5-20, 4-20, 3-20, 2-20, or 1-20 of sequence number 60, 61, 62, 64, 65, 68, 69, 70, 72, 76, 77, 78, 79, 81, 84, 85, 90, 91, 92, 93, 95, 96, 97, 98, 99, 189, or 294. In some embodiments, the spacer of the ngRNA is a ngRNA spacer listed in Table 48. The ngRNA spacers in Table 48 are annotated with their PAM sequences, enabling selection of an appropriate Cas9 protein. It can be advantageous to select a ngRNA spacer that has a PAM sequence compatible with the Cas9 protein used in the Prime Editor, thus avoiding the need to use two different Cas9 proteins. The ngRNA is capable of directing a complexed Cas9 protein to bind the edit strand of the ATP7B gene; thus, a complexed Cas9 nickase containing a nuclease inactivating mutation in the HNH domain will nick the non-edit strand. A PE3 ngRNA spacer has perfect complementarity to the edit strand both pre- and post-edit; a PE3b ngRNA spacer has perfect complementarity to the edit strand post-edit; and a PE3* spacer has perfect complementarity to the edit strand post-edit with a PEgRNA containing an edit template encoding a PAM silencing mutation. Because some PAMs can be silenced by more than 1 synonymous mutation, edit templates (RTTs) encoding a PAM silencing mutation and ngRNA spacers having 100% complementary with the portion of the edit strand containing the encoded PAM silencing mutation are coded with a number following the asterisk (*). Exemplary ngRNA provided in Table 48 can comprise a sequence corresponding to sequence number 100, 101, 102, 103, 104, 105, 107, 108, 109, 110, 112, 113, 114, 117, or 118.

[0414] Table 49 provides Prime Editing guide RNAs (PEgRNAs) that can be used with any Prime Editor containing a Cas9 protein capable of recognizing a GG PAM sequence. The PEgRNAs of Table 49 can also be used in Prime Editing systems further comprising a nick guide RNA (ngRNA). Such PEgRNAs and Prime Editing systems can be used, for example, to correct an R778L mutation in ATP7B.

[0415] The PEgRNAs exemplified in Table 49 comprise: (a) a spacer comprising at its 3′ end a sequence corresponding to sequence number 9973; (b) a gRNA core capable of complexing with a Cas9 protein, and (c) an extension arm comprising: (i) an editing template at least 81 nucleotides in length and comprising at its 3′ end a sequence corresponding to sequence number 9995, and (ii) a prime binding site (PBS) comprising at its 5′ end a sequence corresponding to sequence number 1536. The PEgRNA spacer can be, for example, 16-22 nucleotides in length and can comprise the sequence corresponding to any one of sequence numbers 9973-9979. In some embodiments, the PEgRNA spacer comprises sequence number 9977. The PEgRNA spacers in Table 49 are annotated with their PAM sequence(s), enabling the selection of an appropriate Cas9 protein. The editing template can be referred to as a reverse transcription template (RTT). The editing template can encode wildtype ATP7B gene sequence. For example, the editing template can comprise at its 3′ end the sequence corresponding to any one of sequence numbers 9995-10014. Alternatively, the editing template can encode one or more synonymous mutations relative to the wildtype ATP7B gene. The PBS can be, for example, 3 to 19 nucleotides in length and can comprise the sequence corresponding to sequence number 1536, 1537, 9980, 9981, 9982, 9983, 9984, 9985, 9986, 9987, 9988, 9989, 9990, 9991, 9992, 9993, or 9994. In some cases, a PBS length of no more than 3 nucleotides less than the PEgRNA spacer length is chosen.

[0416] Any of the PEgRNAs of Table 49 can be used in a Prime Editing system further comprising a nick guide RNA (ngRNA). Such ngRNA can comprise a spacer comprising at its 3′ end a sequence corresponding to nucleotides 5-20 of any ngRNA spacer listed in Table 49 and a gRNA core capable of complexing with a Cas9 protein. For example, the sequence in the spacer of the ngRNA can comprise nucleotides 5-20, 4-20, 3-20, 2-20, or 1-20 of sequence number 60, 61, 62, 64, 65, 68, 69, 70, 72, 76, 77, 78, 79, 81, 84, 85, 90, 91, 92, 93, 95, 96, 97, 98, 99, 189, 293, or 294. In some embodiments, the spacer of the ngRNA is a ngRNA spacer listed in Table 49. The ngRNA spacers in Table 49 are annotated with their PAM sequences, enabling selection of an appropriate Cas9 protein. It can be advantageous to select a ngRNA spacer that has a PAM sequence compatible with the Cas9 protein used in the Prime Editor, thus avoiding the need to use two different Cas9 proteins. The ngRNA is capable of directing a complexed Cas9 protein to bind the edit strand of the ATP7B gene; thus, a complexed Cas9 nickase containing a nuclease inactivating mutation in the HNH domain will nick the non-edit strand. A PE3 ngRNA spacer has perfect complementarity to the edit strand both pre- and post-edit; a PE3b ngRNA spacer has perfect complementarity to the edit strand post-edit; and a PE3* spacer has perfect complementarity to the edit strand post-edit with a PEgRNA containing an edit template encoding a PAM silencing mutation. Because some PAMs can be silenced by more than 1 synonymous mutation, edit templates (RTTs) encoding a PAM silencing mutation and ngRNA spacers having 100% complementary with the portion of the edit strand containing the encoded PAM silencing mutation are coded with a number following the asterisk (*). Exemplary ngRNA provided in Table 49 can comprise a sequence corresponding to sequence number 100, 101, 102, 103, 104, 105, 107, 108, 109, 110, 112, 113, 114, 117, or 118.

[0417] Table 50 provides Prime Editing guide RNAs (PEgRNAs) that can be used with any Prime Editor containing a Cas9 protein capable of recognizing a GG PAM sequence. The PEgRNAs of Table 50 can also be used in Prime Editing systems further comprising a nick guide RNA (ngRNA). Such PEgRNAs and Prime Editing systems can be used, for example, to correct an R778L mutation in ATP7B.

[0418] The PEgRNAs exemplified in Table 50 comprise: (a) a spacer comprising at its 3′ end a sequence corresponding to sequence number 10015; (b) a gRNA core capable of complexing with a Cas9 protein, and (c) an extension arm comprising: (i) an editing template at least 72 nucleotides in length and comprising at its 3′ end a sequence corresponding to sequence number 10037, and (ii) a prime binding site (PBS) comprising at its 5′ end a sequence corresponding to sequence number 6298. The PEgRNA spacer can be, for example, 16-22 nucleotides in length and can comprise the sequence corresponding to any one of sequence numbers 10015-10021. In some embodiments, the PEgRNA spacer comprises sequence number 10019. The PEgRNA spacers in Table 50 are annotated with their PAM sequence(s), enabling the selection of an appropriate Cas9 protein. The editing template can be referred to as a reverse transcription template (RTT). The editing template can encode wildtype ATP7B gene sequence. For example, the editing template can comprise at its 3′ end the sequence corresponding to any one of sequence numbers 10037-10065. Alternatively, the editing template can encode one or more synonymous mutations relative to the wildtype ATP7B gene. The PBS can be, for example, 3 to 19 nucleotides in length and can comprise the sequence corresponding to sequence number 6298, 6299, 10022, 10023, 10024, 10025, 10026, 10027, 10028, 10029, 10030, 10031, 10032, 10033, 10034, 10035, or 10036. In some cases, a PBS length of no more than 3 nucleotides less than the PEgRNA spacer length is chosen.

[0419] Any of the PEgRNAs of Table 50 can be used in a Prime Editing system further comprising a nick guide RNA (ngRNA). Such ngRNA can comprise a spacer comprising at its 3′ end a sequence corresponding to nucleotides 5-20 of any ngRNA spacer listed in Table 50 and a gRNA core capable of complexing with a Cas9 protein. For example, the sequence in the spacer of the ngRNA can comprise nucleotides 5-20, 4-20, 3-20, 2-20, or 1-20 of sequence number 60, 61, 62, 64, 65, 68, 70, 72, 76, 77, 78, 79, 81, 84, 85, 90, 91, 92, 93, 95, 96, 97, 98, 99, 189, 293, 294, or 378. In some embodiments, the spacer of the ngRNA is a ngRNA spacer listed in Table 50. The ngRNA spacers in Table 50 are annotated with their PAM sequences, enabling selection of an appropriate Cas9 protein. It can be advantageous to select a ngRNA spacer that has a PAM sequence compatible with the Cas9 protein used in the Prime Editor, thus avoiding the need to use two different Cas9 proteins. The ngRNA is capable of directing a complexed Cas9 protein to bind the edit strand of the ATP7B gene; thus, a complexed Cas9 nickase containing a nuclease inactivating mutation in the HNH domain will nick the non-edit strand. A PE3 ngRNA spacer has perfect complementarity to the edit strand both pre- and post-edit; a PE3b ngRNA spacer has perfect complementarity to the edit strand post-edit; and a PE3* spacer has perfect complementarity to the edit strand post-edit with a PEgRNA containing an edit template encoding a PAM silencing mutation. Because some PAMs can be silenced by more than 1 synonymous mutation, edit templates (RTTs) encoding a PAM silencing mutation and ngRNA spacers having 100% complementary with the portion of the edit strand containing the encoded PAM silencing mutation are coded with a number following the asterisk (*). Exemplary ngRNA provided in Table 50 can comprise a sequence corresponding to sequence number 100, 101, 102, 103, 104, 105, 107, 108, 109, 110, 112, 113, 114, 117, or 118.

[0420] Table 51 provides Prime Editing guide RNAs (PEgRNAs) that can be used with any Prime Editor containing a Cas9 protein capable of recognizing a AG PAM sequence. The PEgRNAs of Table 51 can also be used in Prime Editing systems further comprising a nick guide RNA (ngRNA). Such PEgRNAs and Prime Editing systems can be used, for example, to correct an R778L mutation in ATP7B.

[0421] The PEgRNAs exemplified in Table 51 comprise: (a) a spacer comprising at its 3′ end a sequence corresponding to sequence number 10066; (b) a gRNA core capable of complexing with a Cas9 protein, and (c) an extension arm comprising: (i) an editing template at least 62 nucleotides in length and comprising at its 3′ end a sequence corresponding to any one of sequence numbers 10090-10094, and (ii) a prime binding site (PBS) comprising at its 5′ end a sequence corresponding to sequence number 10073. The PEgRNA spacer can be, for example, 16-22 nucleotides in length and can comprise the sequence corresponding to any one of sequence numbers 10066-10072. In some embodiments, the PEgRNA spacer comprises sequence number 10070. The PEgRNA spacers in Table 51 are annotated with their PAM sequence(s), enabling the selection of an appropriate Cas9 protein. The editing template can be referred to as a reverse transcription template (RTT). The editing template can encode wildtype ATP7B gene sequence. For example, the editing template can comprise at its 3′ end the sequence corresponding to sequence number 10092, 10098, 10100, 10109, 10111, 10119, 10120, 10126, 10131, 10138, 10144, 10145, 10151, 10159, 10162, 10166, 10170, 10178, 10181, 10186, 10190, 10199, 10204, 10206, 10210, 10218, 10223, 10226, 10233, 10235, 10242, 10249, 10251, 10256, 10264, 10266, 10274, 10275, or 10281. Alternatively, the editing template can encode one or more synonymous mutations relative to the wildtype ATP7B gene. The editing template can encode one or more synonymous mutations that are PAM silencing mutations and can comprise at its 3′ end the sequence corresponding to sequence number 10090, 10091, 10093, 10094, 10095, 10096, 10097, 10099, 10101, 10102, 10103, 10104, 10105, 10106, 10107, 10108, 10110, 10112, 10113, 10114, 10115, 10116, 10117, 10118, 10121, 10122, 10123, 10124, 10125, 10127, 10128, 10129, 10130, 10132, 10133, 10134, 10135, 10136, 10137, 10139, 10140, 10141, 10142, 10143, 10146, 10147, 10148, 10149, 10150, 10152, 10153, 10154, 10155, 10156, 10157, 10158, 10160, 10161, 10163, 10164, 10165, 10167, 10168, 10169, 10171, 10172, 10173, 10174, 10175, 10176, 10177, 10179, 10180, 10182, 10183, 10184, 10185, 10187, 10188, 10189, 10191, 10192, 10193, 10194, 10195, 10196, 10197, 10198, 10200, 10201, 10202, 10203, 10205, 10207, 10208, 10209, 10211, 10212, 10213, 10214, 10215, 10216, 10217, 10219, 10220, 10221, 10222, 10224, 10225, 10227, 10228, 10229, 10230, 10231, 10232, 10234, 10236, 10237, 10238, 10239, 10240, 10241, 10243, 10244, 10245, 10246, 10247, 10248, 10250, 10252, 10253, 10254, 10255, 10257, 10258, 10259, 10260, 10261, 10262, 10263, 10265, 10267, 10268, 10269, 10270, 10271, 10272, 10273, 10276, 10277, 10278, 10279, 10280, 10282, 10283, or 10284. The PBS can be, for example, 3 to 19 nucleotides in length and can comprise the sequence corresponding to any one of sequence numbers 10073-10089. In some cases, a PBS length of no more than 3 nucleotides less than the PEgRNA spacer length is chosen.

[0422] Any of the PEgRNAs of Table 51 can be used in a Prime Editing system further comprising a nick guide RNA (ngRNA). Such ngRNA can comprise a spacer comprising at its 3′ end a sequence corresponding to nucleotides 5-20 of any ngRNA spacer listed in Table 51 and a gRNA core capable of complexing with a Cas9 protein. For example, the sequence in the spacer of the ngRNA can comprise nucleotides 5-20, 4-20, 3-20, 2-20, or 1-20 of sequence number 61, 62, 64, 65, 68, 70, 72, 76, 77, 78, 79, 81, 84, 85, 90, 91, 92, 93, 95, 96, 97, 98, 99, 189, 293, 294, 378, 732, 733, 1213, 10285, 10286, 10287, or 10288. In some embodiments, the spacer of the ngRNA is a ngRNA spacer listed in Table 51. The ngRNA spacers in Table 51 are annotated with their PAM sequences, enabling selection of an appropriate Cas9 protein. It can be advantageous to select a ngRNA spacer that has a PAM sequence compatible with the Cas9 protein used in the Prime Editor, thus avoiding the need to use two different Cas9 proteins. The ngRNA is capable of directing a complexed Cas9 protein to bind the edit strand of the ATP7B gene; thus, a complexed Cas9 nickase containing a nuclease inactivating mutation in the HNH domain will nick the non-edit strand. A PE3 ngRNA spacer has perfect complementarity to the edit strand both pre- and post-edit; a PE3b ngRNA spacer has perfect complementarity to the edit strand post-edit; and a PE3* spacer has perfect complementarity to the edit strand post-edit with a PEgRNA containing an edit template encoding a PAM silencing mutation. Because some PAMs can be silenced by more than 1 synonymous mutation, edit templates (RTTs) encoding a PAM silencing mutation and ngRNA spacers having 100% complementary with the portion of the edit strand containing the encoded PAM silencing mutation are coded with a number following the asterisk (*). Exemplary ngRNA provided in Table 51 can comprise a sequence corresponding to sequence number 100, 101, 102, 103, 104, 105, 107, 108, 109, 110, 112, 113, 114, 117, or 118.

[0423] Table 52 provides Prime Editing guide RNAs (PEgRNAs) that can be used with any Prime Editor containing a Cas9 protein capable of recognizing a TG PAM sequence. The PEgRNAs of Table 52 can also be used in Prime Editing systems further comprising a nick guide RNA (ngRNA). Such PEgRNAs and Prime Editing systems can be used, for example, to correct an R778L mutation in ATP7B.

[0424] The PEgRNAs exemplified in Table 52 comprise: (a) a spacer comprising at its 3′ end a sequence corresponding to sequence number 10289; (b) a gRNA core capable of complexing with a Cas9 protein, and (c) an extension arm comprising: (i) an editing template at least 57 nucleotides in length and comprising at its 3′ end a sequence corresponding to sequence number 10311, and (ii) a prime binding site (PBS) comprising at its 5′ end a sequence corresponding to sequence number 10073. The PEgRNA spacer can be, for example, 16-22 nucleotides in length and can comprise the sequence corresponding to any one of sequence numbers 10289-10295. In some embodiments, the PEgRNA spacer comprises sequence number 10293. The PEgRNA spacers in Table 52 are annotated with their PAM sequence(s), enabling the selection of an appropriate Cas9 protein. The editing template can be referred to as a reverse transcription template (RTT). The editing template can encode wildtype ATP7B gene sequence. For example, the editing template can comprise at its 3′ end the sequence corresponding to any one of sequence numbers 10311-10354. Alternatively, the editing template can encode one or more synonymous mutations relative to the wildtype ATP7B gene. The PBS can be, for example, 3 to 19 nucleotides in length and can comprise the sequence corresponding to sequence number 10073, 10074, 10296, 10297, 10298, 10299, 10300, 10301, 10302, 10303, 10304, 10305, 10306, 10307, 10308, 10309, or 10310. In some cases, a PBS length of no more than 3 nucleotides less than the PEgRNA spacer length is chosen.

[0425] Any of the PEgRNAs of Table 52 can be used in a Prime Editing system further comprising a nick guide RNA (ngRNA). Such ngRNA can comprise a spacer comprising at its 3′ end a sequence corresponding to nucleotides 5-20 of any ngRNA spacer listed in Table 52 and a gRNA core capable of complexing with a Cas9 protein. For example, the sequence in the spacer of the ngRNA can comprise nucleotides 5-20, 4-20, 3-20, 2-20, or 1-20 of sequence number 61, 62, 64, 65, 68, 70, 72, 76, 77, 78, 79, 81, 84, 85, 91, 92, 93, 95, 96, 97, 98, 99, 189, 293, 294, 378, 732, 733, 1213, or 1229. In some embodiments, the spacer of the ngRNA is a ngRNA spacer listed in Table 52. The ngRNA spacers in Table 52 are annotated with their PAM sequences, enabling selection of an appropriate Cas9 protein. It can be advantageous to select a ngRNA spacer that has a PAM sequence compatible with the Cas9 protein used in the Prime Editor, thus avoiding the need to use two different Cas9 proteins. The ngRNA is capable of directing a complexed Cas9 protein to bind the edit strand of the ATP7B gene; thus, a complexed Cas9 nickase containing a nuclease inactivating mutation in the HNH domain will nick the non-edit strand. A PE3 ngRNA spacer has perfect complementarity to the edit strand both pre- and post-edit; a PE3b ngRNA spacer has perfect complementarity to the edit strand post-edit; and a PE3* spacer has perfect complementarity to the edit strand post-edit with a PEgRNA containing an edit template encoding a PAM silencing mutation. Because some PAMs can be silenced by more than 1 synonymous mutation, edit templates (RTTs) encoding a PAM silencing mutation and ngRNA spacers having 100% complementary with the portion of the edit strand containing the encoded PAM silencing mutation are coded with a number following the asterisk (*). Exemplary ngRNA provided in Table 52 can comprise a sequence corresponding to sequence number 100, 101, 102, 103, 104, 105, 107, 108, 109, 110, 112, 113, 114, 117, or 118.

[0426] Table 53 provides Prime Editing guide RNAs (PEgRNAs) that can be used with any Prime Editor containing a Cas9 protein capable of recognizing a CG PAM sequence. The PEgRNAs of Table 53 can also be used in Prime Editing systems further comprising a nick guide RNA (ngRNA). Such PEgRNAs and Prime Editing systems can be used, for example, to correct an R778L mutation in ATP7B.

[0427] The PEgRNAs exemplified in Table 53 comprise: (a) a spacer comprising at its 3′ end a sequence corresponding to sequence number 10355; (b) a gRNA core capable of complexing with a Cas9 protein, and (c) an extension arm comprising: (i) an editing template at least 40 nucleotides in length and comprising at its 3′ end a sequence corresponding to any one of sequence numbers 10379-10382, and (ii) a prime binding site (PBS) comprising at its 5′ end a sequence corresponding to sequence number 10362. The PEgRNA spacer can be, for example, 16-22 nucleotides in length and can comprise the sequence corresponding to any one of sequence numbers 10355-10361. In some embodiments, the PEgRNA spacer comprises sequence number 10359. The PEgRNA spacers in Table 53 are annotated with their PAM sequence(s), enabling the selection of an appropriate Cas9 protein. The editing template can be referred to as a reverse transcription template (RTT). The editing template can encode wildtype ATP7B gene sequence. For example, the editing template can comprise at its 3′ end the sequence corresponding to sequence number 10382, 10384, 10388, 10392, 10396, 10399, 10403, 10408, 10412, 10418, 10420, 10424, 10428, 10431, 10438, 10441, 10445, 10448, 10452, 10455, 10459, 10466, 10468, 10473, 10476, 10480, 10486, 10488, 10493, 10497, 10500, 10504, 10508, 10512, 10517, 10521, 10525, 10529, 10533, 10537, 10541, 10546, 10548, 10553, 10558, 10562, 10565, 10567, 10572, 10578, 10581, 10586, 10588, 10591, 10596, 10601, 10605, 10609, 10614, 10616, or 10620. Alternatively, the editing template can encode one or more synonymous mutations relative to the wildtype ATP7B gene. The editing template can encode one or more synonymous mutations that are PAM silencing mutations and can comprise at its 3′ end the sequence corresponding to sequence number 10379, 10380, 10381, 10383, 10385, 10386, 10387, 10389, 10390, 10391, 10393, 10394, 10395, 10397, 10398, 10400, 10401, 10402, 10404, 10405, 10406, 10407, 10409, 10410, 10411, 10413, 10414, 10415, 10416, 10417, 10419, 10421, 10422, 10423, 10425, 10426, 10427, 10429, 10430, 10432, 10433, 10434, 10435, 10436, 10437, 10439, 10440, 10442, 10443, 10444, 10446, 10447, 10449, 10450, 10451, 10453, 10454, 10456, 10457, 10458, 10460, 10461, 10462, 10463, 10464, 10465, 10467, 10469, 10470, 10471, 10472, 10474, 10475, 10477, 10478, 10479, 10481, 10482, 10483, 10484, 10485, 10487, 10489, 10490, 10491, 10492, 10494, 10495, 10496, 10498, 10499, 10501, 10502, 10503, 10505, 10506, 10507, 10509, 10510, 10511, 10513, 10514, 10515, 10516, 10518, 10519, 10520, 10522, 10523, 10524, 10526, 10527, 10528, 10530, 10531, 10532, 10534, 10535, 10536, 10538, 10539, 10540, 10542, 10543, 10544, 10545, 10547, 10549, 10550, 10551, 10552, 10554, 10555, 10556, 10557, 10559, 10560, 10561, 10563, 10564, 10566, 10568, 10569, 10570, 10571, 10573, 10574, 10575, 10576, 10577, 10579, 10580, 10582, 10583, 10584, 10585, 10587, 10589, 10590, 10592, 10593, 10594, 10595, 10597, 10598, 10599, 10600, 10602, 10603, 10604, 10606, 10607, 10608, 10610, 10611, 10612, 10613, 10615, 10617, 10618, 10619, 10621, or 10622. The PBS can be, for example, 3 to 19 nucleotides in length and can comprise the sequence corresponding to any one of sequence numbers 10362-10378. In some cases, a PBS length of no more than 3 nucleotides less than the PEgRNA spacer length is chosen.

[0428] Any of the PEgRNAs of Table 53 can be used in a Prime Editing system further comprising a nick guide RNA (ngRNA). Such ngRNA can comprise a spacer comprising at its 3′ end a sequence corresponding to nucleotides 5-20 of any ngRNA spacer listed in Table 53 and a gRNA core capable of complexing with a Cas9 protein. For example, the sequence in the spacer of the ngRNA can comprise nucleotides 5-20, 4-20, 3-20, 2-20, or 1-20 of sequence number 62, 64, 68, 70, 72, 76, 78, 79, 81, 84, 85, 91, 92, 93, 95, 97, 98, 99, 189, 293, 294, 378, 732, 733, 1212, 1213, 1214, 1228, 1229, 10623, 10624, 10625, 10626, 10627, 10628, 10629, 10630, or 10631. In some embodiments, the spacer of the ngRNA is a ngRNA spacer listed in Table 53. The ngRNA spacers in Table 53 are annotated with their PAM sequences, enabling selection of an appropriate Cas9 protein. It can be advantageous to select a ngRNA spacer that has a PAM sequence compatible with the Cas9 protein used in the Prime Editor, thus avoiding the need to use two different Cas9 proteins. The ngRNA is capable of directing a complexed Cas9 protein to bind the edit strand of the ATP7B gene; thus, a complexed Cas9 nickase containing a nuclease inactivating mutation in the HNH domain will nick the non-edit strand. A PE3 ngRNA spacer has perfect complementarity to the edit strand both pre- and post-edit; a PE3b ngRNA spacer has perfect complementarity to the edit strand post-edit; and a PE3* spacer has perfect complementarity to the edit strand post-edit with a PEgRNA containing an edit template encoding a PAM silencing mutation. Because some PAMs can be silenced by more than 1 synonymous mutation, edit templates (RTTs) encoding a PAM silencing mutation and ngRNA spacers having 100% complementary with the portion of the edit strand containing the encoded PAM silencing mutation are coded with a number following the asterisk (*). Exemplary ngRNA provided in Table 53 can comprise a sequence corresponding to sequence number 100, 101, 103, 104, 105, 107, 109, 110, 112, 113, 114, 117, or 118.

[0429] Table 54 provides Prime Editing guide RNAs (PEgRNAs) that can be used with any Prime Editor containing a Cas9 protein capable of recognizing a TG PAM sequence. The PEgRNAs of Table 54 can also be used in Prime Editing systems further comprising a nick guide RNA (ngRNA). Such PEgRNAs and Prime Editing systems can be used, for example, to correct an R778L mutation in ATP7B.

[0430] The PEgRNAs exemplified in Table 54 comprise: (a) a spacer comprising at its 3′ end a sequence corresponding to sequence number 10632; (b) a gRNA core capable of complexing with a Cas9 protein, and (c) an extension arm comprising: (i) an editing template at least 31 nucleotides in length and comprising at its 3′ end a sequence corresponding to sequence number 10656, and (ii) a prime binding site (PBS) comprising at its 5′ end a sequence corresponding to sequence number 10639. The PEgRNA spacer can be, for example, 16-22 nucleotides in length and can comprise the sequence corresponding to any one of sequence numbers 10632-10638. In some embodiments, the PEgRNA spacer comprises sequence number 10636. The PEgRNA spacers in Table 54 are annotated with their PAM sequence(s), enabling the selection of an appropriate Cas9 protein. The editing template can be referred to as a reverse transcription template (RTT). The editing template can encode wildtype ATP7B gene sequence. For example, the editing template can comprise at its 3′ end the sequence corresponding to any one of sequence numbers 10656-10725. Alternatively, the editing template can encode one or more synonymous mutations relative to the wildtype ATP7B gene. The PBS can be, for example, 3 to 19 nucleotides in length and can comprise the sequence corresponding to any one of sequence numbers 10639-10655. In some cases, a PBS length of no more than 3 nucleotides less than the PEgRNA spacer length is chosen.

[0431] Any of the PEgRNAs of Table 54 can be used in a Prime Editing system further comprising a nick guide RNA (ngRNA). Such ngRNA can comprise a spacer comprising at its 3′ end a sequence corresponding to nucleotides 5-20 of any ngRNA spacer listed in Table 54 and a gRNA core capable of complexing with a Cas9 protein. For example, the sequence in the spacer of the ngRNA can comprise nucleotides 5-20, 4-20, 3-20, 2-20, or 1-20 of sequence number 62, 68, 70, 72, 76, 79, 84, 85, 91, 92, 93, 95, 97, 98, 189, 293, 294, 378, 732, 733, 1212, 1213, 1214, 1223, 1228, 1229, 1233, or 1234. In some embodiments, the spacer of the ngRNA is a ngRNA spacer listed in Table 54. The ngRNA spacers in Table 54 are annotated with their PAM sequences, enabling selection of an appropriate Cas9 protein. It can be advantageous to select a ngRNA spacer that has a PAM sequence compatible with the Cas9 protein used in the Prime Editor, thus avoiding the need to use two different Cas9 proteins. The ngRNA is capable of directing a complexed Cas9 protein to bind the edit strand of the ATP7B gene; thus, a complexed Cas9 nickase containing a nuclease inactivating mutation in the HNH domain will nick the non-edit strand. A PE3 ngRNA spacer has perfect complementarity to the edit strand both pre- and post-edit; a PE3b ngRNA spacer has perfect complementarity to the edit strand post-edit; and a PE3* spacer has perfect complementarity to the edit strand post-edit with a PEgRNA containing an edit template encoding a PAM silencing mutation. Because some PAMs can be silenced by more than 1 synonymous mutation, edit templates (RTTs) encoding a PAM silencing mutation and ngRNA spacers having 100% complementary with the portion of the edit strand containing the encoded PAM silencing mutation are coded with a number following the asterisk (*). Exemplary ngRNA provided in Table 54 can comprise a sequence corresponding to sequence number 100, 101, 103, 104, 105, 107, 109, 110, 112, 113, 114, 117, 118, 1526, or 1527.

[0432] Table 55 provides Prime Editing guide RNAs (PEgRNAs) that can be used with any Prime Editor containing a Cas9 protein capable of recognizing a TG PAM sequence. The PEgRNAs of Table 55 can also be used in Prime Editing systems further comprising a nick guide RNA (ngRNA). Such PEgRNAs and Prime Editing systems can be used, for example, to correct an R778L mutation in ATP7B.

[0433] The PEgRNAs exemplified in Table 55 comprise: (a) a spacer comprising at its 3′ end a sequence corresponding to sequence number 10726; (b) a gRNA core capable of complexing with a Cas9 protein, and (c) an extension arm comprising: (i) an editing template at least 24 nucleotides in length and comprising at its 3′ end a sequence corresponding to sequence number 10749, and (ii) a prime binding site (PBS) comprising at its 5′ end a sequence corresponding to sequence number 6465. The PEgRNA spacer can be, for example, 16-22 nucleotides in length and can comprise the sequence corresponding to any one of sequence numbers 10726-10732. In some embodiments, the PEgRNA spacer comprises sequence number 10730. The PEgRNA spacers in Table 55 are annotated with their PAM sequence(s), enabling the selection of an appropriate Cas9 protein. The editing template can be referred to as a reverse transcription template (RTT). The editing template can encode wildtype ATP7B gene sequence. For example, the editing template can comprise at its 3′ end the sequence corresponding to any one of sequence numbers 10749-10825. Alternatively, the editing template can encode one or more synonymous mutations relative to the wildtype ATP7B gene. The PBS can be, for example, 3 to 19 nucleotides in length and can comprise the sequence corresponding to sequence number 6465, 10733, 10734, 10735, 10736, 10737, 10738, 10739, 10740, 10741, 10742, 10743, 10744, 10745, 10746, 10747, or 10748. In some cases, a PBS length of no more than 3 nucleotides less than the PEgRNA spacer length is chosen.

[0434] Any of the PEgRNAs of Table 55 can be used in a Prime Editing system further comprising a nick guide RNA (ngRNA). Such ngRNA can comprise a spacer comprising at its 3′ end a sequence corresponding to nucleotides 5-20 of any ngRNA spacer listed in Table 55 and a gRNA core capable of complexing with a Cas9 protein. For example, the sequence in the spacer of the ngRNA can comprise nucleotides 5-20, 4-20, 3-20, 2-20, or 1-20 of sequence number 62, 70, 79, 84, 91, 92, 93, 97, 189, 293, 294, 378, 732, 733, 1212, 1213, 1214, 1217, 1223, 1228, 1229, 1233, or 1234. In some embodiments, the spacer of the ngRNA is a ngRNA spacer listed in Table 55. The ngRNA spacers in Table 55 are annotated with their PAM sequences, enabling selection of an appropriate Cas9 protein. It can be advantageous to select a ngRNA spacer that has a PAM sequence compatible with the Cas9 protein used in the Prime Editor, thus avoiding the need to use two different Cas9 proteins. The ngRNA is capable of directing a complexed Cas9 protein to bind the edit strand of the ATP7B gene; thus, a complexed Cas9 nickase containing a nuclease inactivating mutation in the HNH domain will nick the non-edit strand. A PE3 ngRNA spacer has perfect complementarity to the edit strand both pre- and post-edit; a PE3b ngRNA spacer has perfect complementarity to the edit strand post-edit; and a PE3* spacer has perfect complementarity to the edit strand post-edit with a PEgRNA containing an edit template encoding a PAM silencing mutation. Because some PAMs can be silenced by more than 1 synonymous mutation, edit templates (RTTs) encoding a PAM silencing mutation and ngRNA spacers having 100% complementary with the portion of the edit strand containing the encoded PAM silencing mutation are coded with a number following the asterisk (*). Exemplary ngRNA provided in Table 55 can comprise a sequence corresponding to sequence number 103, 104, 107, 114, 117, 1526, or 1527.

[0435] Table 56 provides Prime Editing guide RNAs (PEgRNAs) that can be used with any Prime Editor containing a Cas9 protein capable of recognizing a TG PAM sequence. The PEgRNAs of Table 56 can also be used in Prime Editing systems further comprising a nick guide RNA (ngRNA). Such PEgRNAs and Prime Editing systems can be used, for example, to correct an R778L mutation in ATP7B.

[0436] The PEgRNAs exemplified in Table 56 comprise: (a) a spacer comprising at its 3′ end a sequence corresponding to sequence number 10826; (b) a gRNA core capable of complexing with a Cas9 protein, and (c) an extension arm comprising: (i) an editing template at least 22 nucleotides in length and comprising at its 3′ end a sequence corresponding to any one of sequence numbers 10850-10853, and (ii) a prime binding site (PBS) comprising at its 5′ end a sequence corresponding to sequence number 10833. The PEgRNA spacer can be, for example, 16-22 nucleotides in length and can comprise the sequence corresponding to any one of sequence numbers 10826-10832. In some embodiments, the PEgRNA spacer comprises sequence number 10830. The PEgRNA spacers in Table 56 are annotated with their PAM sequence(s), enabling the selection of an appropriate Cas9 protein. The editing template can be referred to as a reverse transcription template (RTT). The editing template can encode wildtype ATP7B gene sequence. For example, the editing template can comprise at its 3′ end the sequence corresponding to sequence number 10852, 10856, 10860, 10865, 10866, 10870, 10877, 10881, 10883, 10888, 10892, 10894, 10898, 10904, 10907, 10911, 10916, 10919, 10922, 10927, 10933, 10937, 10938, 10943, 10949, 10950, 10955, 10958, 10964, 10967, 10973, 10975, 10981, 10984, 10987, 10992, 10995, 10998, 11003, 11007, 11013, 11017, 11019, 11025, 11028, 11033, 11035, 11038, 11044, 11046, 11053, 11056, 11060, 11063, 11066, 11072, 11074, 11081, 11082, 11088, 11090, 11097, 11098, 11105, 11108, 11112, 11114, 11119, 11122, 11129, 11132, 11136, 11138, 11142, 11149, 11150, 11157, 11158,or 11165. Alternatively, the editing template can encode one or more synonymous mutations relative to the wildtype ATP7B gene. The editing template can encode one or more synonymous mutations that are PAM silencing mutations and can comprise at its 3′ end the sequence corresponding to sequence number 10850, 10851, 10853, 10854, 10855, 10857, 10858, 10859, 10861, 10862, 10863, 10864, 10867, 10868, 10869, 10871, 10872, 10873, 10874, 10875, 10876, 10878, 10879, 10880, 10882, 10884, 10885, 10886, 10887, 10889, 10890, 10891, 10893, 10895, 10896, 10897, 10899, 10900, 10901, 10902, 10903, 10905, 10906, 10908, 10909, 10910, 10912, 10913, 10914, 10915, 10917, 10918, 10920, 10921, 10923, 10924, 10925, 10926, 10928, 10929, 10930, 10931, 10932, 10934, 10935, 10936, 10939, 10940, 10941, 10942, 10944, 10945, 10946, 10947, 10948, 10951, 10952, 10953, 10954, 10956, 10957, 10959, 10960, 10961, 10962, 10963, 10965, 10966, 10968, 10969, 10970, 10971, 10972, 10974, 10976, 10977, 10978, 10979, 10980, 10982, 10983, 10985, 10986, 10988, 10989, 10990, 10991, 10993, 10994, 10996, 10997, 10999, 11000, 11001, 11002, 11004, 11005, 11006, 11008, 11009, 11010, 11011, 11012, 11014, 11015, 11016, 11018, 11020, 11021, 11022, 11023, 11024, 11026, 11027, 11029, 11030, 11031, 11032, 11034, 11036, 11037, 11039, 11040, 11041, 11042, 11043, 11045, 11047, 11048, 11049, 11050, 11051, 11052, 11054, 11055, 11057, 11058, 11059, 11061, 11062, 11064, 11065, 11067, 11068, 11069, 11070, 11071, 11073, 11075, 11076, 11077, 11078, 11079, 11080, 11083, 11084, 11085, 11086, 11087, 11089, 11091, 11092, 11093, 11094, 11095, 11096, 11099, 11100, 11101, 11102, 11103, 11104, 11106, 11107, 11109, 11110, 11111, 11113, 11115, 11116, 11117, 11118, 11120, 11121, 11123, 11124, 11125, 11126, 11127, 11128, 11130, 11131, 11133, 11134, 11135, 11137, 11139, 11140, 11141, 11143, 11144, 11145, 11146, 11147, 11148, 11151, 11152, 11153, 11154, 11155, 11156, 11159, 11160, 11161, 11162, 11163, or 11164. The PBS can be, for example, 3 to 19 nucleotides in length and can comprise the sequence corresponding to any one of sequence numbers 10833-10849. In some cases, a PBS length of no more than 3 nucleotides less than the PEgRNA spacer length is chosen.

[0437] Any of the PEgRNAs of Table 56 can be used in a Prime Editing system further comprising a nick guide RNA (ngRNA). Such ngRNA can comprise a spacer comprising at its 3′ end a sequence corresponding to nucleotides 5-20 of any ngRNA spacer listed in Table 56 and a gRNA core capable of complexing with a Cas9 protein. For example, the sequence in the spacer of the ngRNA can comprise nucleotides 5-20, 4-20, 3-20, 2-20, or 1-20 of sequence number 62, 70, 79, 84, 91, 92, 93, 97, 189, 293, 294, 378, 732, 733, 1212, 1213, 1214, 1217, 1223, 1228, 1229, 1233, 1234, 1240, 11166, 11167, 11168, 11169, 11170, or 11171. In some embodiments, the spacer of the ngRNA is a ngRNA spacer listed in Table 56. The ngRNA spacers in Table 56 are annotated with their PAM sequences, enabling selection of an appropriate Cas9 protein. It can be advantageous to select a ngRNA spacer that has a PAM sequence compatible with the Cas9 protein used in the Prime Editor, thus avoiding the need to use two different Cas9 proteins. The ngRNA is capable of directing a complexed Cas9 protein to bind the edit strand of the ATP7B gene; thus, a complexed Cas9 nickase containing a nuclease inactivating mutation in the HNH domain will nick the non-edit strand. A PE3 ngRNA spacer has perfect complementarity to the edit strand both pre- and post-edit; a PE3b ngRNA spacer has perfect complementarity to the edit strand post-edit; and a PE3* spacer has perfect complementarity to the edit strand post-edit with a PEgRNA containing an edit template encoding a PAM silencing mutation. Because some PAMs can be silenced by more than 1 synonymous mutation, edit templates (RTTs) encoding a PAM silencing mutation and ngRNA spacers having 100% complementary with the portion of the edit strand containing the encoded PAM silencing mutation are coded with a number following the asterisk (*). Exemplary ngRNA provided in Table 56 can comprise a sequence corresponding to sequence number 103, 104, 107, 114, 117, 1526, or 1527.

[0438] Table 57 provides Prime Editing guide RNAs (PEgRNAs) that can be used with any Prime Editor containing a Cas9 protein capable of recognizing a TG PAM sequence. The PEgRNAs of Table 57 can also be used in Prime Editing systems further comprising a nick guide RNA (ngRNA). Such PEgRNAs and Prime Editing systems can be used, for example, to correct an R778L mutation in ATP7B.

[0439] The PEgRNAs exemplified in Table 57 comprise: (a) a spacer comprising at its 3′ end a sequence corresponding to sequence number 11172; (b) a gRNA core capable of complexing with a Cas9 protein, and (c) an extension arm comprising: (i) an editing template at least 15 nucleotides in length and comprising at its 3′ end a sequence corresponding to sequence number 11193, and (ii) a prime binding site (PBS) comprising at its 5′ end a sequence corresponding to sequence number 2024. The PEgRNA spacer can be, for example, 16-22 nucleotides in length and can comprise the sequence corresponding to any one of sequence numbers 11172-11178. In some embodiments, the PEgRNA spacer comprises sequence number 11176. The PEgRNA spacers in Table 57 are annotated with their PAM sequence(s), enabling the selection of an appropriate Cas9 protein. The editing template can be referred to as a reverse transcription template (RTT). The editing template can encode wildtype ATP7B gene sequence. For example, the editing template can comprise at its 3′ end the sequence corresponding to any one of sequence numbers 11193-11278. Alternatively, the editing template can encode one or more synonymous mutations relative to the wildtype ATP7B gene. The PBS can be, for example, 3 to 19 nucleotides in length and can comprise the sequence corresponding to sequence number 2024, 2025, 2026, 11179, 11180, 11181, 11182, 11183, 11184, 11185, 11186, 11187, 11188, 11189, 11190, 11191, or 11192. In some cases, a PBS length of no more than 3 nucleotides less than the PEgRNA spacer length is chosen.

[0440] Any of the PEgRNAs of Table 57 can be used in a Prime Editing system further comprising a nick guide RNA (ngRNA). Such ngRNA can comprise a spacer comprising at its 3′ end a sequence corresponding to nucleotides 5-20 of any ngRNA spacer listed in Table 57 and a gRNA core capable of complexing with a Cas9 protein. For example, the sequence in the spacer of the ngRNA can comprise nucleotides 5-20, 4-20, 3-20, 2-20, or 1-20 of sequence number 62, 70, 79, 84, 92, 93, 189, 293, 294, 378, 732, 733, 1212, 1213, 1214, 1217, 1220, 1222, 1223, 1228, 1229, 1233, 1234, 1239, 1240, or 1243. In some embodiments, the spacer of the ngRNA is a ngRNA spacer listed in Table 57. The ngRNA spacers in Table 57 are annotated with their PAM sequences, enabling selection of an appropriate Cas9 protein. It can be advantageous to select a ngRNA spacer that has a PAM sequence compatible with the Cas9 protein used in the Prime Editor, thus avoiding the need to use two different Cas9 proteins. The ngRNA is capable of directing a complexed Cas9 protein to bind the edit strand of the ATP7B gene; thus, a complexed Cas9 nickase containing a nuclease inactivating mutation in the HNH domain will nick the non-edit strand. A PE3 ngRNA spacer has perfect complementarity to the edit strand both pre- and post-edit; a PE3b ngRNA spacer has perfect complementarity to the edit strand post-edit; and a PE3* spacer has perfect complementarity to the edit strand post-edit with a PEgRNA containing an edit template encoding a PAM silencing mutation. Because some PAMs can be silenced by more than 1 synonymous mutation, edit templates (RTTs) encoding a PAM silencing mutation and ngRNA spacers having 100% complementary with the portion of the edit strand containing the encoded PAM silencing mutation are coded with a number following the asterisk (*). Exemplary ngRNA provided in Table 57 can comprise a sequence corresponding to sequence number 103, 104, 107, 114, 117, 1525, 1526, 1527, or 1528.

[0441] Table 58 provides Prime Editing guide RNAs (PEgRNAs) that can be used with any Prime Editor containing a Cas9 protein capable of recognizing a GG PAM sequence. The PEgRNAs of Table 58 can also be used in Prime Editing systems further comprising a nick guide RNA (ngRNA). Such PEgRNAs and Prime Editing systems can be used, for example, to correct an R778L mutation in ATP7B.

[0442] The PEgRNAs exemplified in Table 58 comprise: (a) a spacer comprising at its 3′ end a sequence corresponding to sequence number 11279; (b) a gRNA core capable of complexing with a Cas9 protein, and (c) an extension arm comprising: (i) an editing template at least 10 nucleotides in length and comprising at its 3′ end a sequence corresponding to sequence number 11302, and (ii) a prime binding site (PBS) comprising at its 5′ end a sequence corresponding to sequence number 5632. The PEgRNA spacer can be, for example, 16-22 nucleotides in length and can comprise the sequence corresponding to any one of sequence numbers 11279-11285. In some embodiments, the PEgRNA spacer comprises sequence number 11283. The PEgRNA spacers in Table 58 are annotated with their PAM sequence(s), enabling the selection of an appropriate Cas9 protein. The editing template can be referred to as a reverse transcription template (RTT). The editing template can encode wildtype ATP7B gene sequence. For example, the editing template can comprise at its 3′ end the sequence corresponding to any one of sequence numbers 11302-11392. Alternatively, the editing template can encode one or more synonymous mutations relative to the wildtype ATP7B gene. The PBS can be, for example, 3 to 19 nucleotides in length and can comprise the sequence corresponding to sequence number 5632, 11286, 11287, 11288, 11289, 11290, 11291, 11292, 11293, 11294, 11295, 11296, 11297, 11298, 11299, 11300, or 11301. In some cases, a PBS length of no more than 3 nucleotides less than the PEgRNA spacer length is chosen.

[0443] Any of the PEgRNAs of Table 58 can be used in a Prime Editing system further comprising a nick guide RNA (ngRNA). Such ngRNA can comprise a spacer comprising at its 3′ end a sequence corresponding to nucleotides 5-20 of any ngRNA spacer listed in Table 58 and a gRNA core capable of complexing with a Cas9 protein. For example, the sequence in the spacer of the ngRNA can comprise nucleotides 5-20, 4-20, 3-20, 2-20, or 1-20 of sequence number 62, 70, 84, 92, 93, 189, 293, 294, 378, 732, 733, 1212, 1213, 1214, 1217, 1220, 1222, 1223, 1228, 1229, 1233, 1234, 1238, 1239, 1240, 1243, or 1843. In some embodiments, the spacer of the ngRNA is a ngRNA spacer listed in Table 58. The ngRNA spacers in Table 58 are annotated with their PAM sequences, enabling selection of an appropriate Cas9 protein. It can be advantageous to select a ngRNA spacer that has a PAM sequence compatible with the Cas9 protein used in the Prime Editor, thus avoiding the need to use two different Cas9 proteins. The ngRNA is capable of directing a complexed Cas9 protein to bind the edit strand of the ATP7B gene; thus, a complexed Cas9 nickase containing a nuclease inactivating mutation in the HNH domain will nick the non-edit strand. A PE3 ngRNA spacer has perfect complementarity to the edit strand both pre- and post-edit; a PE3b ngRNA spacer has perfect complementarity to the edit strand post-edit; and a PE3* spacer has perfect complementarity to the edit strand post-edit with a PEgRNA containing an edit template encoding a PAM silencing mutation. Because some PAMs can be silenced by more than 1 synonymous mutation, edit templates (RTTs) encoding a PAM silencing mutation and ngRNA spacers having 100% complementary with the portion of the edit strand containing the encoded PAM silencing mutation are coded with a number following the asterisk (*). Exemplary ngRNA provided in Table 58 can comprise a sequence corresponding to sequence number 103, 104, 107, 114, 117, 1525, 1526, 1527, or 1528.

[0444] Table 59 provides Prime Editing guide RNAs (PEgRNAs) that can be used with any Prime Editor containing a Cas9 protein capable of recognizing a TG PAM sequence. The PEgRNAs of Table 59 can also be used in Prime Editing systems further comprising a nick guide RNA (ngRNA). Such PEgRNAs and Prime Editing systems can be used, for example, to correct an R778L mutation in ATP7B.

[0445] The PEgRNAs exemplified in Table 59 comprise: (a) a spacer comprising at its 3′ end a sequence corresponding to sequence number 11393; (b) a gRNA core capable of complexing with a Cas9 protein, and (c) an extension arm comprising: (i) an editing template at least 10 nucleotides in length and comprising at its 3′ end a sequence corresponding to any one of sequence numbers 11416-11420, and (ii) a prime binding site (PBS) comprising at its 5′ end a sequence corresponding to sequence number 4183. The PEgRNA spacer can be, for example, 16-22 nucleotides in length and can comprise the sequence corresponding to any one of sequence numbers 11393-11399. In some embodiments, the PEgRNA spacer comprises sequence number 11397. The PEgRNA spacers in Table 59 are annotated with their PAM sequence(s), enabling the selection of an appropriate Cas9 protein. The editing template can be referred to as a reverse transcription template (RTT). The editing template can encode wildtype ATP7B gene sequence. For example, the editing template can comprise at its 3′ end the sequence corresponding to sequence number 11418, 11422, 11427, 11435, 11440, 11443, 11447, 11454, 11457, 11465, 11469, 11471, 11477, 11484, 11488, 11491, 11498, 11503, 11508, 11514, 11516, 11521, 11526, 11535, 11536, 11545, 11546, 11554, 11558, 11565, 11568, 11571, 11577, 11583, 11590, 11595, 11598, 11602, 11606, 11615, 11619, 11625, 11626, 11634, 11638, 11644, 11649, 11651, 11660, 11661, 11669, 11673, 11677, 11684, 11689, 11691, 11699, 11705, 11706, 11714, 11719, 11721, 11727, 11735, 11740, 11741, 11748, 11752, 11760, 11765, 11766, 11771, 11777, 11783, 11790, 11793, 11799, 11804, 11807, 11812, 11816, 11821, 11830, 11835, 11836, 11843, 11849, 11852, 11858, 11865, or 11867. Alternatively, the editing template can encode one or more synonymous mutations relative to the wildtype ATP7B gene. The editing template can encode one or more synonymous mutations that are PAM silencing mutations and can comprise at its 3′ end the sequence corresponding to sequence number 11416, 11417, 11419, 11420, 11421, 11423, 11424, 11425, 11426, 11428, 11429, 11430, 11431, 11432, 11433, 11434, 11436, 11437, 11438, 11439, 11441, 11442, 11444, 11445, 11446, 11448, 11449, 11450, 11451, 11452, 11453, 11455, 11456, 11458, 11459, 11460, 11461, 11462, 11463, 11464, 11466, 11467, 11468, 11470, 11472, 11473, 11474, 11475, 11476, 11478, 11479, 11480, 11481, 11482, 11483, 11485, 11486, 11487, 11489, 11490, 11492, 11493, 11494, 11495, 11496, 11497, 11499, 11500, 11501, 11502, 11504, 11505, 11506, 11507, 11509, 11510, 11511, 11512, 11513, 11515, 11517, 11518, 11519, 11520, 11522, 11523, 11524, 11525, 11527, 11528, 11529, 11530, 11531, 11532, 11533, 11534, 11537, 11538, 11539, 11540, 11541, 11542, 11543, 11544, 11547, 11548, 11549, 11550, 11551, 11552, 11553, 11555, 11556, 11557, 11559, 11560, 11561, 11562, 11563, 11564, 11566, 11567, 11569, 11570, 11572, 11573, 11574, 11575, 11576, 11578, 11579, 11580, 11581, 11582, 11584, 11585, 11586, 11587, 11588, 11589, 11591, 11592, 11593, 11594, 11596, 11597, 11599, 11600, 11601, 11603, 11604, 11605, 11607, 11608, 11609, 11610, 11611, 11612, 11613, 11614, 11616, 11617, 11618, 11620, 11621, 11622, 11623, 11624, 11627, 11628, 11629, 11630, 11631, 11632, 11633, 11635, 11636, 11637, 11639, 11640, 11641, 11642, 11643, 11645, 11646, 11647, 11648, 11650, 11652, 11653, 11654, 11655, 11656, 11657, 11658, 11659, 11662, 11663, 11664, 11665, 11666, 11667, 11668, 11670, 11671, 11672, 11674, 11675, 11676, 11678, 11679, 11680, 11681, 11682, 11683, 11685, 11686, 11687, 11688, 11690, 11692, 11693, 11694, 11695, 11696, 11697, 11698, 11700, 11701, 11702, 11703, 11704, 11707, 11708, 11709, 11710, 11711, 11712, 11713, 11715, 11716, 11717, 11718, 11720, 11722, 11723, 11724, 11725, 11726, 11728, 11729, 11730, 11731, 11732, 11733, 11734, 11736, 11737, 11738, 11739, 11742, 11743, 11744, 11745, 11746, 11747, 11749, 11750, 11751, 11753, 11754, 11755, 11756, 11757, 11758, 11759, 11761, 11762, 11763, 11764, 11767, 11768, 11769, 11770, 11772, 11773, 11774, 11775, 11776, 11778, 11779, 11780, 11781, 11782, 11784, 11785, 11786, 11787, 11788, 11789, 11791, 11792, 11794, 11795, 11796, 11797, 11798, 11800, 11801, 11802, 11803, 11805, 11806, 11808, 11809, 11810, 11811, 11813, 11814, 11815, 11817, 11818, 11819, 11820, 11822, 11823, 11824, 11825, 11826, 11827, 11828, 11829, 11831, 11832, 11833, 11834, 11837, 11838, 11839, 11840, 11841, 11842, 11844, 11845, 11846, 11847, 11848, 11850, 11851, 11853, 11854, 11855, 11856, 11857, 11859, 11860, 11861, 11862, 11863, 11864, 11866, 11868, 11869, or 11870. The PBS can be, for example, 3 to 19 nucleotides in length and can comprise the sequence corresponding to sequence number 4183, 11400, 11401, 11402, 11403, 11404, 11405, 11406, 11407, 11408, 11409, 11410, 11411, 11412, 11413, 11414, or 11415. In some cases, a PBS length of no more than 3 nucleotides less than the PEgRNA spacer length is chosen.

[0446] Any of the PEgRNAs of Table 59 can be used in a Prime Editing system further comprising a nick guide RNA (ngRNA). Such ngRNA can comprise a spacer comprising at its 3′ end a sequence corresponding to nucleotides 5-20 of any ngRNA spacer listed in Table 59 and a gRNA core capable of complexing with a Cas9 protein. For example, the sequence in the spacer of the ngRNA can comprise nucleotides 5-20, 4-20, 3-20, 2-20, or 1-20 of sequence number 62, 84, 92, 93, 189, 293, 294, 378, 732, 733, 1212, 1213, 1214, 1217, 1220, 1222, 1223, 1228, 1229, 1233, 1234, 1238, 1239, 1240, 1243, 1843, 1844, 1845, 11871, 11872, 11873, 11874, 11875, 11876, 11877, 11878, 11879, 11880, 11881, 11882, 11883, or 11884. In some embodiments, the spacer of the ngRNA is a ngRNA spacer listed in Table 59. The ngRNA spacers in Table 59 are annotated with their PAM sequences, enabling selection of an appropriate Cas9 protein. It can be advantageous to select a ngRNA spacer that has a PAM sequence compatible with the Cas9 protein used in the Prime Editor, thus avoiding the need to use two different Cas9 proteins. The ngRNA is capable of directing a complexed Cas9 protein to bind the edit strand of the ATP7B gene; thus, a complexed Cas9 nickase containing a nuclease inactivating mutation in the HNH domain will nick the non-edit strand. A PE3 ngRNA spacer has perfect complementarity to the edit strand both pre- and post-edit; a PE3b ngRNA spacer has perfect complementarity to the edit strand post-edit; and a PE3* spacer has perfect complementarity to the edit strand post-edit with a PEgRNA containing an edit template encoding a PAM silencing mutation. Because some PAMs can be silenced by more than 1 synonymous mutation, edit templates (RTTs) encoding a PAM silencing mutation and ngRNA spacers having 100% complementary with the portion of the edit strand containing the encoded PAM silencing mutation are coded with a number following the asterisk (*). Exemplary ngRNA provided in Table 59 can comprise a sequence corresponding to sequence number 103, 104, 107, 114, 117, 1525, 1526, 1527, 1528, 1958, or 1959.

[0447] Table 60 provides Prime Editing guide RNAs (PEgRNAs) that can be used with any Prime Editor containing a Cas9 protein capable of recognizing a GG PAM sequence. The PEgRNAs of Table 60 can also be used in Prime Editing systems further comprising a nick guide RNA (ngRNA). Such PEgRNAs and Prime Editing systems can be used, for example, to correct an R778L mutation in ATP7B.

[0448] The PEgRNAs exemplified in Table 60 comprise: (a) a spacer comprising at its 3′ end a sequence corresponding to sequence number 11885; (b) a gRNA core capable of complexing with a Cas9 protein, and (c) an extension arm comprising: (i) an editing template at least 10 nucleotides in length and comprising at its 3′ end a sequence corresponding to sequence number 11908, and (ii) a prime binding site (PBS) comprising at its 5′ end a sequence corresponding to sequence number 5632. The PEgRNA spacer can be, for example, 16-22 nucleotides in length and can comprise the sequence corresponding to any one of sequence numbers 11885-11891. In some embodiments, the PEgRNA spacer comprises sequence number 11889. The PEgRNA spacers in Table 60 are annotated with their PAM sequence(s), enabling the selection of an appropriate Cas9 protein. The editing template can be referred to as a reverse transcription template (RTT). The editing template can encode wildtype ATP7B gene sequence. For example, the editing template can comprise at its 3′ end the sequence corresponding to any one of sequence numbers 11908-11998. Alternatively, the editing template can encode one or more synonymous mutations relative to the wildtype ATP7B gene. The PBS can be, for example, 3 to 19 nucleotides in length and can comprise the sequence corresponding to sequence number 5632, 11892, 11893, 11894, 11895, 11896, 11897, 11898, 11899, 11900, 11901, 11902, 11903, 11904, 11905, 11906, or 11907. In some cases, a PBS length of no more than 3 nucleotides less than the PEgRNA spacer length is chosen.

[0449] Any of the PEgRNAs of Table 60 can be used in a Prime Editing system further comprising a nick guide RNA (ngRNA). Such ngRNA can comprise a spacer comprising at its 3′ end a sequence corresponding to nucleotides 5-20 of any ngRNA spacer listed in Table 60 and a gRNA core capable of complexing with a Cas9 protein. For example, the sequence in the spacer of the ngRNA can comprise nucleotides 5-20, 4-20, 3-20, 2-20, or 1-20 of sequence number 62, 84, 189, 293, 294, 378, 732, 733, 1212, 1213, 1214, 1217, 1220, 1222, 1223, 1228, 1229, 1233, 1234, 1238, 1239, 1240, 1243, 1843, 1844, or 1845. In some embodiments, the spacer of the ngRNA is a ngRNA spacer listed in Table 60. The ngRNA spacers in Table 60 are annotated with their PAM sequences, enabling selection of an appropriate Cas9 protein. It can be advantageous to select a ngRNA spacer that has a PAM sequence compatible with the Cas9 protein used in the Prime Editor, thus avoiding the need to use two different Cas9 proteins. The ngRNA is capable of directing a complexed Cas9 protein to bind the edit strand of the ATP7B gene; thus, a complexed Cas9 nickase containing a nuclease inactivating mutation in the HNH domain will nick the non-edit strand. A PE3 ngRNA spacer has perfect complementarity to the edit strand both pre- and post-edit; a PE3b ngRNA spacer has perfect complementarity to the edit strand post-edit; and a PE3* spacer has perfect complementarity to the edit strand post-edit with a PEgRNA containing an edit template encoding a PAM silencing mutation. Because some PAMs can be silenced by more than 1 synonymous mutation, edit templates (RTTs) encoding a PAM silencing mutation and ngRNA spacers having 100% complementary with the portion of the edit strand containing the encoded PAM silencing mutation are coded with a number following the asterisk (*). Exemplary ngRNA provided in Table 60 can comprise a sequence corresponding to sequence number 107, 114, 1525, 1526, 1527, 1528, 1958, or 1959.

[0450] Table 61 provides Prime Editing guide RNAs (PEgRNAs) that can be used with any Prime Editor containing a Cas9 protein capable of recognizing a GG PAM sequence. The PEgRNAs of Table 61 can also be used in Prime Editing systems further comprising a nick guide RNA (ngRNA). Such PEgRNAs and Prime Editing systems can be used, for example, to correct an R778L mutation in ATP7B.

[0451] The PEgRNAs exemplified in Table 61 comprise: (a) a spacer comprising at its 3′ end a sequence corresponding to sequence number 11999; (b) a gRNA core capable of complexing with a Cas9 protein, and (c) an extension arm comprising: (i) an editing template at least 95 nucleotides in length and comprising at its 3′ end a sequence corresponding to sequence number 12023, and (ii) a prime binding site (PBS) comprising at its 5′ end a sequence corresponding to sequence number 12006. The PEgRNA spacer can be, for example, 16-22 nucleotides in length and can comprise the sequence corresponding to any one of sequence numbers 11999-12005. In some embodiments, the PEgRNA spacer comprises sequence number 12003. The PEgRNA spacers in Table 61 are annotated with their PAM sequence(s), enabling the selection of an appropriate Cas9 protein. The editing template can be referred to as a reverse transcription template (RTT). The editing template can encode wildtype ATP7B gene sequence. For example, the editing template can comprise at its 3′ end the sequence corresponding to any one of sequence numbers 12023-12028. Alternatively, the editing template can encode one or more synonymous mutations relative to the wildtype ATP7B gene. The PBS can be, for example, 3 to 19 nucleotides in length and can comprise the sequence corresponding to any one of sequence numbers 12006-12022. In some cases, a PBS length of no more than 3 nucleotides less than the PEgRNA spacer length is chosen.

[0452] Any of the PEgRNAs of Table 61 can be used in a Prime Editing system further comprising a nick guide RNA (ngRNA). Such ngRNA can comprise a spacer comprising at its 3′ end a sequence corresponding to nucleotides 5-20 of any ngRNA spacer listed in Table 61 and a gRNA core capable of complexing with a Cas9 protein. For example, the sequence in the spacer of the ngRNA can comprise nucleotides 5-20, 4-20, 3-20, 2-20, or 1-20 of any one of sequence numbers 1989-2009. In some embodiments, the spacer of the ngRNA is a ngRNA spacer listed in Table 61. The ngRNA spacers in Table 61 are annotated with their PAM sequences, enabling selection of an appropriate Cas9 protein. It can be advantageous to select a ngRNA spacer that has a PAM sequence compatible with the Cas9 protein used in the Prime Editor, thus avoiding the need to use two different Cas9 proteins. The ngRNA is capable of directing a complexed Cas9 protein to bind the edit strand of the ATP7B gene; thus, a complexed Cas9 nickase containing a nuclease inactivating mutation in the HNH domain will nick the non-edit strand. A PE3 ngRNA spacer has perfect complementarity to the edit strand both pre- and post-edit; a PE3b ngRNA spacer has perfect complementarity to the edit strand post-edit; and a PE3* spacer has perfect complementarity to the edit strand post-edit with a PEgRNA containing an edit template encoding a PAM silencing mutation. Because some PAMs can be silenced by more than 1 synonymous mutation, edit templates (RTTs) encoding a PAM silencing mutation and ngRNA spacers having 100% complementary with the portion of the edit strand containing the encoded PAM silencing mutation are coded with a number following the asterisk (*). Exemplary ngRNA provided in Table 61 can comprise a sequence corresponding to any one of sequence numbers 2010-2016.

[0453] Table 62 provides Prime Editing guide RNAs (PEgRNAs) that can be used with any Prime Editor containing a Cas9 protein capable of recognizing a TG PAM sequence. The PEgRNAs of Table 62 can also be used in Prime Editing systems further comprising a nick guide RNA (ngRNA). Such PEgRNAs and Prime Editing systems can be used, for example, to correct an R778L mutation in ATP7B.

[0454] The PEgRNAs exemplified in Table 62 comprise: (a) a spacer comprising at its 3′ end a sequence corresponding to sequence number 12029; (b) a gRNA core capable of complexing with a Cas9 protein, and (c) an extension arm comprising: (i) an editing template at least 93 nucleotides in length and comprising at its 3′ end a sequence corresponding to sequence number 12053, and (ii) a prime binding site (PBS) comprising at its 5′ end a sequence corresponding to sequence number 12036. The PEgRNA spacer can be, for example, 16-22 nucleotides in length and can comprise the sequence corresponding to any one of sequence numbers 12029-12035. In some embodiments, the PEgRNA spacer comprises sequence number 12033. The PEgRNA spacers in Table 62 are annotated with their PAM sequence(s), enabling the selection of an appropriate Cas9 protein. The editing template can be referred to as a reverse transcription template (RTT). The editing template can encode wildtype ATP7B gene sequence. For example, the editing template can comprise at its 3′ end the sequence corresponding to any one of sequence numbers 12053-12060. Alternatively, the editing template can encode one or more synonymous mutations relative to the wildtype ATP7B gene. The PBS can be, for example, 3 to 19 nucleotides in length and can comprise the sequence corresponding to any one of sequence numbers 12036-12052. In some cases, a PBS length of no more than 3 nucleotides less than the PEgRNA spacer length is chosen.

[0455] Any of the PEgRNAs of Table 62 can be used in a Prime Editing system further comprising a nick guide RNA (ngRNA). Such ngRNA can comprise a spacer comprising at its 3′ end a sequence corresponding to nucleotides 5-20 of any ngRNA spacer listed in Table 62 and a gRNA core capable of complexing with a Cas9 protein. For example, the sequence in the spacer of the ngRNA can comprise nucleotides 5-20, 4-20, 3-20, 2-20, or 1-20 of sequence number 1989, 1990, 1991, 1992, 1993, 1994, 1995, 1996, 1997, 1998, 1999, 2000, 2001, 2002, 2003, 2004, 2005, 2006, 2007, 2008, or 2059. In some embodiments, the spacer of the ngRNA is a ngRNA spacer listed in Table 62. The ngRNA spacers in Table 62 are annotated with their PAM sequences, enabling selection of an appropriate Cas9 protein. It can be advantageous to select a ngRNA spacer that has a PAM sequence compatible with the Cas9 protein used in the Prime Editor, thus avoiding the need to use two different Cas9 proteins. The ngRNA is capable of directing a complexed Cas9 protein to bind the edit strand of the ATP7B gene; thus, a complexed Cas9 nickase containing a nuclease inactivating mutation in the HNH domain will nick the non-edit strand. A PE3 ngRNA spacer has perfect complementarity to the edit strand both pre- and post-edit; a PE3b ngRNA spacer has perfect complementarity to the edit strand post-edit; and a PE3* spacer has perfect complementarity to the edit strand post-edit with a PEgRNA containing an edit template encoding a PAM silencing mutation. Because some PAMs can be silenced by more than 1 synonymous mutation, edit templates (RTTs) encoding a PAM silencing mutation and ngRNA spacers having 100% complementary with the portion of the edit strand containing the encoded PAM silencing mutation are coded with a number following the asterisk (*). Exemplary ngRNA provided in Table 62 can comprise a sequence corresponding to any one of sequence numbers 2010-2016.

[0456] Table 63 provides Prime Editing guide RNAs (PEgRNAs) that can be used with any Prime Editor containing a Cas9 protein capable of recognizing a AG PAM sequence. The PEgRNAs of Table 63 can also be used in Prime Editing systems further comprising a nick guide RNA (ngRNA). Such PEgRNAs and Prime Editing systems can be used, for example, to correct an R778L mutation in ATP7B.

[0457] The PEgRNAs exemplified in Table 63 comprise: (a) a spacer comprising at its 3′ end a sequence corresponding to sequence number 12061; (b) a gRNA core capable of complexing with a Cas9 protein, and (c) an extension arm comprising: (i) an editing template at least 82 nucleotides in length and comprising at its 3′ end a sequence corresponding to sequence number 12084, and (ii) a prime binding site (PBS) comprising at its 5′ end a sequence corresponding to sequence number 387. The PEgRNA spacer can be, for example, 16-22 nucleotides in length and can comprise the sequence corresponding to any one of sequence numbers 12061-12067. In some embodiments, the PEgRNA spacer comprises sequence number 12065. The PEgRNA spacers in Table 63 are annotated with their PAM sequence(s), enabling the selection of an appropriate Cas9 protein. The editing template can be referred to as a reverse transcription template (RTT). The editing template can encode wildtype ATP7B gene sequence. For example, the editing template can comprise at its 3′ end the sequence corresponding to any one of sequence numbers 12084-12102. Alternatively, the editing template can encode one or more synonymous mutations relative to the wildtype ATP7B gene. The PBS can be, for example, 3 to 19 nucleotides in length and can comprise the sequence corresponding to sequence number 387, 12068, 12069, 12070, 12071, 12072, 12073, 12074, 12075, 12076, 12077, 12078, 12079, 12080, 12081, 12082, or 12083. In some cases, a PBS length of no more than 3 nucleotides less than the PEgRNA spacer length is chosen.

[0458] Any of the PEgRNAs of Table 63 can be used in a Prime Editing system further comprising a nick guide RNA (ngRNA). Such ngRNA can comprise a spacer comprising at its 3′ end a sequence corresponding to nucleotides 5-20 of any ngRNA spacer listed in Table 63 and a gRNA core capable of complexing with a Cas9 protein. For example, the sequence in the spacer of the ngRNA can comprise nucleotides 5-20, 4-20, 3-20, 2-20, or 1-20 of sequence number 1989, 1990, 1991, 1992, 1993, 1994, 1995, 1996, 1997, 1998, 1999, 2000, 2001, 2002, 2003, 2004, 2005, 2006, 2008, 2056, 2057, 2058, or 2059. In some embodiments, the spacer of the ngRNA is a ngRNA spacer listed in Table 63. The ngRNA spacers in Table 63 are annotated with their PAM sequences, enabling selection of an appropriate Cas9 protein. It can be advantageous to select a ngRNA spacer that has a PAM sequence compatible with the Cas9 protein used in the Prime Editor, thus avoiding the need to use two different Cas9 proteins. The ngRNA is capable of directing a complexed Cas9 protein to bind the edit strand of the ATP7B gene; thus, a complexed Cas9 nickase containing a nuclease inactivating mutation in the HNH domain will nick the non-edit strand. A PE3 ngRNA spacer has perfect complementarity to the edit strand both pre- and post-edit; a PE3b ngRNA spacer has perfect complementarity to the edit strand post-edit; and a PE3* spacer has perfect complementarity to the edit strand post-edit with a PEgRNA containing an edit template encoding a PAM silencing mutation. Because some PAMs can be silenced by more than 1 synonymous mutation, edit templates (RTTs) encoding a PAM silencing mutation and ngRNA spacers having 100% complementary with the portion of the edit strand containing the encoded PAM silencing mutation are coded with a number following the asterisk (*). Exemplary ngRNA provided in Table 63 can comprise a sequence corresponding to sequence number 2010, 2011, 2012, 2013, 2014, 2015, 2016, 2060, 2061, or 2062.

[0459] Table 64 provides Prime Editing guide RNAs (PEgRNAs) that can be used with any Prime Editor containing a Cas9 protein capable of recognizing a TG PAM sequence. The PEgRNAs of Table 64 can also be used in Prime Editing systems further comprising a nick guide RNA (ngRNA). Such PEgRNAs and Prime Editing systems can be used, for example, to correct an R778L mutation in ATP7B.

[0460] The PEgRNAs exemplified in Table 64 comprise: (a) a spacer comprising at its 3′ end a sequence corresponding to sequence number 12103; (b) a gRNA core capable of complexing with a Cas9 protein, and (c) an extension arm comprising: (i) an editing template at least 73 nucleotides in length and comprising at its 3′ end a sequence corresponding to sequence number 12126, and (ii) a prime binding site (PBS) comprising at its 5′ end a sequence corresponding to sequence number 10073. The PEgRNA spacer can be, for example, 16-22 nucleotides in length and can comprise the sequence corresponding to any one of sequence numbers 12103-12109. In some embodiments, the PEgRNA spacer comprises sequence number 12107. The PEgRNA spacers in Table 64 are annotated with their PAM sequence(s), enabling the selection of an appropriate Cas9 protein. The editing template can be referred to as a reverse transcription template (RTT). The editing template can encode wildtype ATP7B gene sequence. For example, the editing template can comprise at its 3′ end the sequence corresponding to any one of sequence numbers 12126-12153. Alternatively, the editing template can encode one or more synonymous mutations relative to the wildtype ATP7B gene. The PBS can be, for example, 3 to 19 nucleotides in length and can comprise the sequence corresponding to sequence number 10073, 12110, 12111, 12112, 12113, 12114, 12115, 12116, 12117, 12118, 12119, 12120, 12121, 12122, 12123, 12124, or 12125. In some cases, a PBS length of no more than 3 nucleotides less than the PEgRNA spacer length is chosen.

[0461] Any of the PEgRNAs of Table 64 can be used in a Prime Editing system further comprising a nick guide RNA (ngRNA). Such ngRNA can comprise a spacer comprising at its 3′ end a sequence corresponding to nucleotides 5-20 of any ngRNA spacer listed in Table 64 and a gRNA core capable of complexing with a Cas9 protein. For example, the sequence in the spacer of the ngRNA can comprise nucleotides 5-20, 4-20, 3-20, 2-20, or 1-20 of sequence number 1989, 1990, 1992, 1993, 1994, 1995, 1996, 1997, 1998, 1999, 2000, 2001, 2002, 2003, 2004, 2005, 2006, 2008, 2056, 2057, 2058, 2059, 2125, or 2126. In some embodiments, the spacer of the ngRNA is a ngRNA spacer listed in Table 64. The ngRNA spacers in Table 64 are annotated with their PAM sequences, enabling selection of an appropriate Cas9 protein. It can be advantageous to select a ngRNA spacer that has a PAM sequence compatible with the Cas9 protein used in the Prime Editor, thus avoiding the need to use two different Cas9 proteins. The ngRNA is capable of directing a complexed Cas9 protein to bind the edit strand of the ATP7B gene; thus, a complexed Cas9 nickase containing a nuclease inactivating mutation in the HNH domain will nick the non-edit strand. A PE3 ngRNA spacer has perfect complementarity to the edit strand both pre- and post-edit; a PE3b ngRNA spacer has perfect complementarity to the edit strand post-edit; and a PE3* spacer has perfect complementarity to the edit strand post-edit with a PEgRNA containing an edit template encoding a PAM silencing mutation. Because some PAMs can be silenced by more than 1 synonymous mutation, edit templates (RTTs) encoding a PAM silencing mutation and ngRNA spacers having 100% complementary with the portion of the edit strand containing the encoded PAM silencing mutation are coded with a number following the asterisk (*). Exemplary ngRNA provided in Table 64 can comprise a sequence corresponding to sequence number 2010, 2011, 2012, 2013, 2014, 2015, 2016, 2060, 2061, or 2062.

[0462] Table 65 provides Prime Editing guide RNAs (PEgRNAs) that can be used with any Prime Editor containing a Cas9 protein capable of recognizing a AG PAM sequence. The PEgRNAs of Table 65 can also be used in Prime Editing systems further comprising a nick guide RNA (ngRNA). Such PEgRNAs and Prime Editing systems can be used, for example, to correct an R778L mutation in ATP7B.

[0463] The PEgRNAs exemplified in Table 65 comprise: (a) a spacer comprising at its 3′ end a sequence corresponding to sequence number 12154; (b) a gRNA core capable of complexing with a Cas9 protein, and (c) an extension arm comprising: (i) an editing template at least 60 nucleotides in length and comprising at its 3′ end a sequence corresponding to sequence number 12176, and (ii) a prime binding site (PBS) comprising at its 5′ end a sequence corresponding to sequence number 6298. The PEgRNA spacer can be, for example, 16-22 nucleotides in length and can comprise the sequence corresponding to any one of sequence numbers 12154-12160. In some embodiments, the PEgRNA spacer comprises sequence number 12158. The PEgRNA spacers in Table 65 are annotated with their PAM sequence(s), enabling the selection of an appropriate Cas9 protein. The editing template can be referred to as a reverse transcription template (RTT). The editing template can encode wildtype ATP7B gene sequence. For example, the editing template can comprise at its 3′ end the sequence corresponding to sequence number 12176-12216. Alternatively, the editing template can encode one or more synonymous mutations relative to the wildtype ATP7B gene. The PBS can be, for example, 3 to 19 nucleotides in length and can comprise the sequence corresponding to sequence number 6298, 6299, 12161, 12162, 12163, 12164, 12165, 12166, 12167, 12168, 12169, 12170, 12171, 12172, 12173, 12174, or 12175. In some cases, a PBS length of no more than 3 nucleotides less than the PEgRNA spacer length is chosen.

[0464] Any of the PEgRNAs of Table 65 can be used in a Prime Editing system further comprising a nick guide RNA (ngRNA). Such ngRNA can comprise a spacer comprising at its 3′ end a sequence corresponding to nucleotides 5-20 of any ngRNA spacer listed in Table 65 and a gRNA core capable of complexing with a Cas9 protein. For example, the sequence in the spacer of the ngRNA can comprise nucleotides 5-20, 4-20, 3-20, 2-20, or 1-20 of sequence number 1989, 1990, 1992, 1993, 1994, 1995, 1996, 1997, 1998, 1999, 2000, 2001, 2002, 2003, 2004, 2005, 2006, 2008, 2056, 2057, 2058, 2059, 2125, 2126, 2127, or 3262. In some embodiments, the spacer of the ngRNA is a ngRNA spacer listed in Table 65. The ngRNA spacers in Table 65 are annotated with their PAM sequences, enabling selection of an appropriate Cas9 protein. It can be advantageous to select a ngRNA spacer that has a PAM sequence compatible with the Cas9 protein used in the Prime Editor, thus avoiding the need to use two different Cas9 proteins. The ngRNA is capable of directing a complexed Cas9 protein to bind the edit strand of the ATP7B gene; thus, a complexed Cas9 nickase containing a nuclease inactivating mutation in the HNH domain will nick the non-edit strand. A PE3 ngRNA spacer has perfect complementarity to the edit strand both pre- and post-edit; a PE3b ngRNA spacer has perfect complementarity to the edit strand post-edit; and a PE3* spacer has perfect complementarity to the edit strand post-edit with a PEgRNA containing an edit template encoding a PAM silencing mutation. Because some PAMs can be silenced by more than 1 synonymous mutation, edit templates (RTTs) encoding a PAM silencing mutation and ngRNA spacers having 100% complementary with the portion of the edit strand containing the encoded PAM silencing mutation are coded with a number following the asterisk (*). Exemplary ngRNA provided in Table 65 can comprise a sequence corresponding to sequence number 2010, 2011, 2012, 2013, 2014, 2015, 2016, 2060, 2061, or 2062.

[0465] Table 66 provides Prime Editing guide RNAs (PEgRNAs) that can be used with any Prime Editor containing a Cas9 protein capable of recognizing a AG PAM sequence. The PEgRNAs of Table 66 can also be used in Prime Editing systems further comprising a nick guide RNA (ngRNA). Such PEgRNAs and Prime Editing systems can be used, for example, to correct an R778L mutation in ATP7B.

[0466] The PEgRNAs exemplified in Table 66 comprise: (a) a spacer comprising at its 3′ end a sequence corresponding to sequence number 12217; (b) a gRNA core capable of complexing with a Cas9 protein, and (c) an extension arm comprising: (i) an editing template at least 57 nucleotides in length and comprising at its 3′ end a sequence corresponding to sequence number 12238, and (ii) a prime binding site (PBS) comprising at its 5′ end a sequence corresponding to sequence number 4314. The PEgRNA spacer can be, for example, 16-22 nucleotides in length and can comprise the sequence corresponding to any one of sequence numbers 12217-12223. In some embodiments, the PEgRNA spacer comprises sequence number 12221. The PEgRNA spacers in Table 66 are annotated with their PAM sequence(s), enabling the selection of an appropriate Cas9 protein. The editing template can be referred to as a reverse transcription template (RTT). The editing template can encode wildtype ATP7B gene sequence. For example, the editing template can comprise at its 3′ end the sequence corresponding to any one of sequence numbers 12238-12281. Alternatively, the editing template can encode one or more synonymous mutations relative to the wildtype ATP7B gene. The PBS can be, for example, 3 to 19 nucleotides in length and can comprise the sequence corresponding to sequence number 4314, 4315, 4316, 12224, 12225, 12226, 12227, 12228, 12229, 12230, 12231, 12232, 12233, 12234, 12235, 12236, or 12237. In some cases, a PBS length of no more than 3 nucleotides less than the PEgRNA spacer length is chosen.

[0467] Any of the PEgRNAs of Table 66 can be used in a Prime Editing system further comprising a nick guide RNA (ngRNA). Such ngRNA can comprise a spacer comprising at its 3′ end a sequence corresponding to nucleotides 5-20 of any ngRNA spacer listed in Table 66 and a gRNA core capable of complexing with a Cas9 protein. For example, the sequence in the spacer of the ngRNA can comprise nucleotides 5-20, 4-20, 3-20, 2-20, or 1-20 of sequence number 1989, 1990, 1992, 1994, 1995, 1996, 1997, 1998, 1999, 2000, 2001, 2002, 2003, 2004, 2005, 2006, 2008, 2056, 2057, 2058, 2059, 2125, 2126, 2127, or 3262. In some embodiments, the spacer of the ngRNA is a ngRNA spacer listed in Table 66. The ngRNA spacers in Table 66 are annotated with their PAM sequences, enabling selection of an appropriate Cas9 protein. It can be advantageous to select a ngRNA spacer that has a PAM sequence compatible with the Cas9 protein used in the Prime Editor, thus avoiding the need to use two different Cas9 proteins. The ngRNA is capable of directing a complexed Cas9 protein to bind the edit strand of the ATP7B gene; thus, a complexed Cas9 nickase containing a nuclease inactivating mutation in the HNH domain will nick the non-edit strand. A PE3 ngRNA spacer has perfect complementarity to the edit strand both pre- and post-edit; a PE3b ngRNA spacer has perfect complementarity to the edit strand post-edit; and a PE3* spacer has perfect complementarity to the edit strand post-edit with a PEgRNA containing an edit template encoding a PAM silencing mutation. Because some PAMs can be silenced by more than 1 synonymous mutation, edit templates (RTTs) encoding a PAM silencing mutation and ngRNA spacers having 100% complementary with the portion of the edit strand containing the encoded PAM silencing mutation are coded with a number following the asterisk (*). Exemplary ngRNA provided in Table 66 can comprise a sequence corresponding to sequence number 2010, 2011, 2012, 2013, 2014, 2015, 2016, 2060, 2061, or 2062.

[0468] Table 67 provides Prime Editing guide RNAs (PEgRNAs) that can be used with any Prime Editor containing a Cas9 protein capable of recognizing a AG PAM sequence. The PEgRNAs of Table 67 can also be used in Prime Editing systems further comprising a nick guide RNA (ngRNA). Such PEgRNAs and Prime Editing systems can be used, for example, to correct an R778L mutation in ATP7B.

[0469] The PEgRNAs exemplified in Table 67 comprise: (a) a spacer comprising at its 3′ end a sequence corresponding to sequence number 12282; (b) a gRNA core capable of complexing with a Cas9 protein, and (c) an extension arm comprising: (i) an editing template at least 38 nucleotides in length and comprising at its 3′ end a sequence corresponding to sequence number 12306, and (ii) a prime binding site (PBS) comprising at its 5′ end a sequence corresponding to sequence number 12289. The PEgRNA spacer can be, for example, 16-22 nucleotides in length and can comprise the sequence corresponding to any one of sequence numbers 12282-12288. In some embodiments, the PEgRNA spacer comprises sequence number 12286. The PEgRNA spacers in Table 67 are annotated with their PAM sequence(s), enabling the selection of an appropriate Cas9 protein. The editing template can be referred to as a reverse transcription template (RTT). The editing template can encode wildtype ATP7B gene sequence. For example, the editing template can comprise at its 3′ end the sequence corresponding to any one of sequence numbers 12306-12368. Alternatively, the editing template can encode one or more synonymous mutations relative to the wildtype ATP7B gene. The PBS can be, for example, 3 to 19 nucleotides in length and can comprise the sequence corresponding to any one of sequence numbers 12289-12305. In some cases, a PBS length of no more than 3 nucleotides less than the PEgRNA spacer length is chosen.

[0470] Any of the PEgRNAs of Table 67 can be used in a Prime Editing system further comprising a nick guide RNA (ngRNA). Such ngRNA can comprise a spacer comprising at its 3′ end a sequence corresponding to nucleotides 5-20 of any ngRNA spacer listed in Table 67 and a gRNA core capable of complexing with a Cas9 protein. For example, the sequence in the spacer of the ngRNA can comprise nucleotides 5-20, 4-20, 3-20, 2-20, or 1-20 of sequence number 1989, 1990, 1992, 1994, 1997, 1998, 2000, 2001, 2003, 2004, 2005, 2006, 2008, 2056, 2057, 2058, 2059, 2125, 2126, 2127, 3248, 3262, 3277, 3287, or 3291. In some embodiments, the spacer of the ngRNA is a ngRNA spacer listed in Table 67. The ngRNA spacers in Table 67 are annotated with their PAM sequences, enabling selection of an appropriate Cas9 protein. It can be advantageous to select a ngRNA spacer that has a PAM sequence compatible with the Cas9 protein used in the Prime Editor, thus avoiding the need to use two different Cas9 proteins. The ngRNA is capable of directing a complexed Cas9 protein to bind the edit strand of the ATP7B gene; thus, a complexed Cas9 nickase containing a nuclease inactivating mutation in the HNH domain will nick the non-edit strand. A PE3 ngRNA spacer has perfect complementarity to the edit strand both pre- and post-edit; a PE3b ngRNA spacer has perfect complementarity to the edit strand post-edit; and a PE3* spacer has perfect complementarity to the edit strand post-edit with a PEgRNA containing an edit template encoding a PAM silencing mutation. Because some PAMs can be silenced by more than 1 synonymous mutation, edit templates (RTTs) encoding a PAM silencing mutation and ngRNA spacers having 100% complementary with the portion of the edit strand containing the encoded PAM silencing mutation are coded with a number following the asterisk (*). Exemplary ngRNA provided in Table 67 can comprise a sequence corresponding to sequence number 2010, 2011, 2012, 2013, 2014, 2015, 2016, 2060, 2061, or 2062.

[0471] Table 68 provides Prime Editing guide RNAs (PEgRNAs) that can be used with any Prime Editor containing a Cas9 protein capable of recognizing a TG PAM sequence. The PEgRNAs of Table 68 can also be used in Prime Editing systems further comprising a nick guide RNA (ngRNA). Such PEgRNAs and Prime Editing systems can be used, for example, to correct an R778L mutation in ATP7B.

[0472] The PEgRNAs exemplified in Table 68 comprise: (a) a spacer comprising at its 3′ end a sequence corresponding to sequence number 12369; (b) a gRNA core capable of complexing with a Cas9 protein, and (c) an extension arm comprising: (i) an editing template at least 35 nucleotides in length and comprising at its 3′ end a sequence corresponding to sequence number 12391, and (ii) a prime binding site (PBS) comprising at its 5′ end a sequence corresponding to sequence number 6298. The PEgRNA spacer can be, for example, 16-22 nucleotides in length and can comprise the sequence corresponding to any one of sequence numbers 12369-12375. In some embodiments, the PEgRNA spacer comprises sequence number 12373. The PEgRNA spacers in Table 68 are annotated with their PAM sequence(s), enabling the selection of an appropriate Cas9 protein. The editing template can be referred to as a reverse transcription template (RTT). The editing template can encode wildtype ATP7B gene sequence. For example, the editing template can comprise at its 3′ end the sequence corresponding to any one of sequence numbers 12391-12456. Alternatively, the editing template can encode one or more synonymous mutations relative to the wildtype ATP7B gene. The PBS can be, for example, 3 to 19 nucleotides in length and can comprise the sequence corresponding to sequence number 6298, 6299, 12376, 12377, 12378, 12379, 12380, 12381, 12382, 12383, 12384, 12385, 12386, 12387, 12388, 12389, or 12390. In some cases, a PBS length of no more than 3 nucleotides less than the PEgRNA spacer length is chosen.

[0473] Any of the PEgRNAs of Table 68 can be used in a Prime Editing system further comprising a nick guide RNA (ngRNA). Such ngRNA can comprise a spacer comprising at its 3′ end a sequence corresponding to nucleotides 5-20 of any ngRNA spacer listed in Table 68 and a gRNA core capable of complexing with a Cas9 protein. For example, the sequence in the spacer of the ngRNA can comprise nucleotides 5-20, 4-20, 3-20, 2-20, or 1-20 of sequence number 1989, 1990, 1992, 1994, 1997, 1998, 2000, 2001, 2003, 2004, 2005, 2006, 2008, 2056, 2057, 2058, 2059, 2125, 2126, 2127, 3248, 3262, 3268, 3277, 3283, 3287, or 3291. In some embodiments, the spacer of the ngRNA is a ngRNA spacer listed in Table 68. The ngRNA spacers in Table 68 are annotated with their PAM sequences, enabling selection of an appropriate Cas9 protein. It can be advantageous to select a ngRNA spacer that has a PAM sequence compatible with the Cas9 protein used in the Prime Editor, thus avoiding the need to use two different Cas9 proteins. The ngRNA is capable of directing a complexed Cas9 protein to bind the edit strand of the ATP7B gene; thus, a complexed Cas9 nickase containing a nuclease inactivating mutation in the HNH domain will nick the non-edit strand. A PE3 ngRNA spacer has perfect complementarity to the edit strand both pre- and post-edit; a PE3b ngRNA spacer has perfect complementarity to the edit strand post-edit; and a PE3* spacer has perfect complementarity to the edit strand post-edit with a PEgRNA containing an edit template encoding a PAM silencing mutation. Because some PAMs can be silenced by more than 1 synonymous mutation, edit templates (RTTs) encoding a PAM silencing mutation and ngRNA spacers having 100% complementary with the portion of the edit strand containing the encoded PAM silencing mutation are coded with a number following the asterisk (*). Exemplary ngRNA provided in Table 68 can comprise a sequence corresponding to sequence number 2010, 2011, 2012, 2013, 2014, 2015, 2016, 2060, 2061, 2062, 4091, or 4124.

[0474] Table 69 provides Prime Editing guide RNAs (PEgRNAs) that can be used with any Prime Editor containing a Cas9 protein capable of recognizing a TG PAM sequence. The PEgRNAs of Table 69 can also be used in Prime Editing systems further comprising a nick guide RNA (ngRNA). Such PEgRNAs and Prime Editing systems can be used, for example, to correct an R778L mutation in ATP7B.

[0475] The PEgRNAs exemplified in Table 69 comprise: (a) a spacer comprising at its 3′ end a sequence corresponding to sequence number 12457; (b) a gRNA core capable of complexing with a Cas9 protein, and (c) an extension arm comprising: (i) an editing template at least 32 nucleotides in length and comprising at its 3′ end a sequence corresponding to sequence number 12480, and (ii) a prime binding site (PBS) comprising at its 5′ end a sequence corresponding to sequence number 2135. The PEgRNA spacer can be, for example, 16-22 nucleotides in length and can comprise the sequence corresponding to any one of sequence numbers 12457-12463. In some embodiments, the PEgRNA spacer comprises sequence number 12461. The PEgRNA spacers in Table 69 are annotated with their PAM sequence(s), enabling the selection of an appropriate Cas9 protein. The editing template can be referred to as a reverse transcription template (RTT). The editing template can encode wildtype ATP7B gene sequence. For example, the editing template can comprise at its 3′ end the sequence corresponding to any one of sequence numbers 12480-12548. Alternatively, the editing template can encode one or more synonymous mutations relative to the wildtype ATP7B gene. The PBS can be, for example, 3 to 19 nucleotides in length and can comprise the sequence corresponding to sequence number 2135, 12464, 12465, 12466, 12467, 12468, 12469, 12470, 12471, 12472, 12473, 12474, 12475, 12476, 12477, 12478, or 12479. In some cases, a PBS length of no more than 3 nucleotides less than the PEgRNA spacer length is chosen.

[0476] Any of the PEgRNAs of Table 69 can be used in a Prime Editing system further comprising a nick guide RNA (ngRNA). Such ngRNA can comprise a spacer comprising at its 3′ end a sequence corresponding to nucleotides 5-20 of any ngRNA spacer listed in Table 69 and a gRNA core capable of complexing with a Cas9 protein. For example, the sequence in the spacer of the ngRNA can comprise nucleotides 5-20, 4-20, 3-20, 2-20, or 1-20 of sequence number 1989, 1990, 1994, 1998, 2000, 2001, 2003, 2004, 2005, 2006, 2008, 2056, 2057, 2058, 2059, 2125, 2126, 2127, 3248, 3262, 3268, 3277, 3282, 3283, 3285, 3287, or 3291. In some embodiments, the spacer of the ngRNA is a ngRNA spacer listed in Table 69. The ngRNA spacers in Table 69 are annotated with their PAM sequences, enabling selection of an appropriate Cas9 protein. It can be advantageous to select a ngRNA spacer that has a PAM sequence compatible with the Cas9 protein used in the Prime Editor, thus avoiding the need to use two different Cas9 proteins. The ngRNA is capable of directing a complexed Cas9 protein to bind the edit strand of the ATP7B gene; thus, a complexed Cas9 nickase containing a nuclease inactivating mutation in the HNH domain will nick the non-edit strand. A PE3 ngRNA spacer has perfect complementarity to the edit strand both pre- and post-edit; a PE3b ngRNA spacer has perfect complementarity to the edit strand post-edit; and a PE3* spacer has perfect complementarity to the edit strand post-edit with a PEgRNA containing an edit template encoding a PAM silencing mutation. Because some PAMs can be silenced by more than 1 synonymous mutation, edit templates (RTTs) encoding a PAM silencing mutation and ngRNA spacers having 100% complementary with the portion of the edit strand containing the encoded PAM silencing mutation are coded with a number following the asterisk (*). Exemplary ngRNA provided in Table 69 can comprise a sequence corresponding to sequence number 2011, 2012, 2013, 2014, 2015, 2016, 2060, 2061, 2062, 4091, or 4124.

[0477] Table 70 provides Prime Editing guide RNAs (PEgRNAs) that can be used with any Prime Editor containing a Cas9 protein capable of recognizing a TG PAM sequence. The PEgRNAs of Table 70 can also be used in Prime Editing systems further comprising a nick guide RNA (ngRNA). Such PEgRNAs and Prime Editing systems can be used, for example, to correct an R778L mutation in ATP7B.

[0478] The PEgRNAs exemplified in Table 70 comprise: (a) a spacer comprising at its 3′ end a sequence corresponding to sequence number 12549; (b) a gRNA core capable of complexing with a Cas9 protein, and (c) an extension arm comprising: (i) an editing template at least 23 nucleotides in length and comprising at its 3′ end a sequence corresponding to sequence number 12571, and (ii) a prime binding site (PBS) comprising at its 5′ end a sequence corresponding to sequence number 2070. The PEgRNA spacer can be, for example, 16-22 nucleotides in length and can comprise the sequence corresponding to any one of sequence numbers 12549-12555. In some embodiments, the PEgRNA spacer comprises sequence number 12553. The PEgRNA spacers in Table 70 are annotated with their PAM sequence(s), enabling the selection of an appropriate Cas9 protein. The editing template can be referred to as a reverse transcription template (RTT). The editing template can encode wildtype ATP7B gene sequence. For example, the editing template can comprise at its 3′ end the sequence corresponding to any one of sequence numbers 12571-12648. Alternatively, the editing template can encode one or more synonymous mutations relative to the wildtype ATP7B gene. The PBS can be, for example, 3 to 19 nucleotides in length and can comprise the sequence corresponding to sequence number 2070, 2071, 12556, 12557, 12558, 12559, 12560, 12561, 12562, 12563, 12564, 12565, 12566, 12567, 12568, 12569, or 12570. In some cases, a PBS length of no more than 3 nucleotides less than the PEgRNA spacer length is chosen.

[0479] Any of the PEgRNAs of Table 70 can be used in a Prime Editing system further comprising a nick guide RNA (ngRNA). Such ngRNA can comprise a spacer comprising at its 3′ end a sequence corresponding to nucleotides 5-20 of any ngRNA spacer listed in Table 70 and a gRNA core capable of complexing with a Cas9 protein. For example, the sequence in the spacer of the ngRNA can comprise nucleotides 5-20, 4-20, 3-20, 2-20, or 1-20 of sequence number 1990, 1994, 1998, 2000, 2001, 2003, 2004, 2005, 2006, 2056, 2057, 2058, 2059, 2125, 2126, 2127, 3248, 3260, 3262, 3263, 3266, 3268, 3269, 3270, 3277, 3282, 3283, 3285, 3287, or 3291. In some embodiments, the spacer of the ngRNA is a ngRNA spacer listed in Table 70. The ngRNA spacers in Table 70 are annotated with their PAM sequences, enabling selection of an appropriate Cas9 protein. It can be advantageous to select a ngRNA spacer that has a PAM sequence compatible with the Cas9 protein used in the Prime Editor, thus avoiding the need to use two different Cas9 proteins. The ngRNA is capable of directing a complexed Cas9 protein to bind the edit strand of the ATP7B gene; thus, a complexed Cas9 nickase containing a nuclease inactivating mutation in the HNH domain will nick the non-edit strand. A PE3 ngRNA spacer has perfect complementarity to the edit strand both pre- and post-edit; a PE3b ngRNA spacer has perfect complementarity to the edit strand post-edit; and a PE3* spacer has perfect complementarity to the edit strand post-edit with a PEgRNA containing an edit template encoding a PAM silencing mutation. Because some PAMs can be silenced by more than 1 synonymous mutation, edit templates (RTTs) encoding a PAM silencing mutation and ngRNA spacers having 100% complementary with the portion of the edit strand containing the encoded PAM silencing mutation are coded with a number following the asterisk (*). Exemplary ngRNA provided in Table 70 can comprise a sequence corresponding to sequence number 2011, 2012, 2013, 2014, 2015, 2016, 2060, 2061, 2062, 4091, 4105, 4106, or 4124.

[0480] Table 71 provides Prime Editing guide RNAs (PEgRNAs) that can be used with any Prime Editor containing a Cas9 protein capable of recognizing a AG PAM sequence. The PEgRNAs of Table 71 can also be used in Prime Editing systems further comprising a nick guide RNA (ngRNA). Such PEgRNAs and Prime Editing systems can be used, for example, to correct an R778L mutation in ATP7B.

[0481] The PEgRNAs exemplified in Table 71 comprise: (a) a spacer comprising at its 3′ end a sequence corresponding to sequence number 12649; (b) a gRNA core capable of complexing with a Cas9 protein, and (c) an extension arm comprising: (i) an editing template at least 18 nucleotides in length and comprising at its 3′ end a sequence corresponding to any one of sequence numbers 12672-12673, and (ii) a prime binding site (PBS) comprising at its 5′ end a sequence corresponding to sequence number 200. The PEgRNA spacer can be, for example, 16-22 nucleotides in length and can comprise the sequence corresponding to any one of sequence numbers 12649-12655. In some embodiments, the PEgRNA spacer comprises sequence number 12653. The PEgRNA spacers in Table 71 are annotated with their PAM sequence(s), enabling the selection of an appropriate Cas9 protein. The editing template can be referred to as a reverse transcription template (RTT). The editing template can encode wildtype ATP7B gene sequence. For example, the editing template can comprise at its 3′ end the sequence corresponding to sequence number 12672, 12675, 12677, 12679, 12681, 12682, 12685, 12687, 12688, 12691, 12693, 12694, 12696, 12699, 12700, 12702, 12704, 12707, 12708, 12711, 12713, 12714, 12717, 12718, 12721, 12723, 12725, 12727, 12729, 12730, 12732, 12735, 12737, 12738, 12741, 12742, 12744, 12746, 12749, 12751, 12753, 12755, 12757, 12759, 12760, 12762, 12764, 12766, 12768, 12771, 12772, 12774, 12777, 12779, 12780, 12782, 12785, 12786, 12789, 12790, 12793, 12794, 12796, 12799, 12800, 12802, 12804, 12807, 12808, 12810, 12812, 12815, 12816, 12818, 12821, 12822, 12824, 12827, 12828, 12830, 12832, 12835, or 12837. Alternatively, the editing template can encode one or more synonymous mutations relative to the wildtype ATP7B gene. The editing template can encode one or more synonymous mutations that are PAM silencing mutations and can comprise at its 3′ end the sequence corresponding to sequence number 12673, 12674, 12676, 12678, 12680, 12683, 12684, 12686, 12689, 12690, 12692, 12695, 12697, 12698, 12701, 12703, 12705, 12706, 12709, 12710, 12712, 12715, 12716, 12719, 12720, 12722, 12724, 12726, 12728, 12731, 12733, 12734, 12736, 12739, 12740, 12743, 12745, 12747, 12748, 12750, 12752, 12754, 12756, 12758, 12761, 12763, 12765, 12767, 12769, 12770, 12773, 12775, 12776, 12778, 12781, 12783, 12784, 12787, 12788, 12791, 12792, 12795, 12797, 12798, 12801, 12803, 12805, 12806, 12809, 12811, 12813, 12814, 12817, 12819, 12820, 12823, 12825, 12826, 12829, 12831, 12833, 12834, or 12836. The PBS can be, for example, 3 to 19 nucleotides in length and can comprise the sequence corresponding to sequence number 200, 12656, 12657, 12658, 12659, 12660, 12661, 12662, 12663, 12664, 12665, 12666, 12667, 12668, 12669, 12670, or 12671. In some cases, a PBS length of no more than 3 nucleotides less than the PEgRNA spacer length is chosen.

[0482] Any of the PEgRNAs of Table 71 can be used in a Prime Editing system further comprising a nick guide RNA (ngRNA). Such ngRNA can comprise a spacer comprising at its 3′ end a sequence corresponding to nucleotides 5-20 of any ngRNA spacer listed in Table 71 and a gRNA core capable of complexing with a Cas9 protein. For example, the sequence in the spacer of the ngRNA can comprise nucleotides 5-20, 4-20, 3-20, 2-20, or 1-20 of sequence number 1990, 1994, 1998, 2000, 2003, 2004, 2005, 2006, 2056, 2057, 2058, 2059, 2125, 2126, 2127, 3248, 3260, 3262, 3263, 3266, 3268, 3269, 3270, 3277, 3279, 3282, 3283, 3285, 3287, 3291, 3295, 12838, 12839, or 12840. In some embodiments, the spacer of the ngRNA is a ngRNA spacer listed in Table 71. The ngRNA spacers in Table 71 are annotated with their PAM sequences, enabling selection of an appropriate Cas9 protein. It can be advantageous to select a ngRNA spacer that has a PAM sequence compatible with the Cas9 protein used in the Prime Editor, thus avoiding the need to use two different Cas9 proteins. The ngRNA is capable of directing a complexed Cas9 protein to bind the edit strand of the ATP7B gene; thus, a complexed Cas9 nickase containing a nuclease inactivating mutation in the HNH domain will nick the non-edit strand. A PE3 ngRNA spacer has perfect complementarity to the edit strand both pre- and post-edit; a PE3b ngRNA spacer has perfect complementarity to the edit strand post-edit; and a PE3* spacer has perfect complementarity to the edit strand post-edit with a PEgRNA containing an edit template encoding a PAM silencing mutation. Because some PAMs can be silenced by more than 1 synonymous mutation, edit templates (RTTs) encoding a PAM silencing mutation and ngRNA spacers having 100% complementary with the portion of the edit strand containing the encoded PAM silencing mutation are coded with a number following the asterisk (*). Exemplary ngRNA provided in Table 71 can comprise a sequence corresponding to sequence number 2011, 2012, 2013, 2014, 2015, 2016, 2060, 2061, 2062, 4091, 4105, 4106, 4110, or 4124.

[0483] Table 72 provides Prime Editing guide RNAs (PEgRNAs) that can be used with any Prime Editor containing a Cas9 protein capable of recognizing a TG PAM sequence. The PEgRNAs of Table 72 can also be used in Prime Editing systems further comprising a nick guide RNA (ngRNA). Such PEgRNAs and Prime Editing systems can be used, for example, to correct an R778L mutation in ATP7B.

[0484] The PEgRNAs exemplified in Table 72 comprise: (a) a spacer comprising at its 3′ end a sequence corresponding to sequence number 12841; (b) a gRNA core capable of complexing with a Cas9 protein, and (c) an extension arm comprising: (i) an editing template at least 16 nucleotides in length and comprising at its 3′ end a sequence corresponding to sequence number 12862, and (ii) a prime binding site (PBS) comprising at its 5′ end a sequence corresponding to sequence number 5632. The PEgRNA spacer can be, for example, 16-22 nucleotides in length and can comprise the sequence corresponding to any one of sequence numbers 12841-12847. In some embodiments, the PEgRNA spacer comprises sequence number 12845. The PEgRNA spacers in Table 72 are annotated with their PAM sequence(s), enabling the selection of an appropriate Cas9 protein. The editing template can be referred to as a reverse transcription template (RTT). The editing template can encode wildtype ATP7B gene sequence. For example, the editing template can comprise at its 3′ end the sequence corresponding to any one of sequence numbers 12862-12946. Alternatively, the editing template can encode one or more synonymous mutations relative to the wildtype ATP7B gene. The PBS can be, for example, 3 to 19 nucleotides in length and can comprise the sequence corresponding to sequence number 5632, 11286, 11287, 12848, 12849, 12850, 12851, 12852, 12853, 12854, 12855, 12856, 12857, 12858, 12859, 12860, or 12861. In some cases, a PBS length of no more than 3 nucleotides less than the PEgRNA spacer length is chosen.

[0485] Any of the PEgRNAs of Table 72 can be used in a Prime Editing system further comprising a nick guide RNA (ngRNA). Such ngRNA can comprise a spacer comprising at its 3′ end a sequence corresponding to nucleotides 5-20 of any ngRNA spacer listed in Table 72 and a gRNA core capable of complexing with a Cas9 protein. For example, the sequence in the spacer of the ngRNA can comprise nucleotides 5-20, 4-20, 3-20, 2-20, or 1-20 of sequence number 1994, 1998, 2000, 2003, 2004, 2005, 2006, 2056, 2057, 2058, 2059, 2125, 2126, 2127, 3248, 3260, 3262, 3263, 3266, 3268, 3269, 3270, 3277, 3279, 3280, 3282, 3283, 3285, 3287, 3291, or 3295. In some embodiments, the spacer of the ngRNA is a ngRNA spacer listed in Table 72. The ngRNA spacers in Table 72 are annotated with their PAM sequences, enabling selection of an appropriate Cas9 protein. It can be advantageous to select a ngRNA spacer that has a PAM sequence compatible with the Cas9 protein used in the Prime Editor, thus avoiding the need to use two different Cas9 proteins. The ngRNA is capable of directing a complexed Cas9 protein to bind the edit strand of the ATP7B gene; thus, a complexed Cas9 nickase containing a nuclease inactivating mutation in the HNH domain will nick the non-edit strand. A PE3 ngRNA spacer has perfect complementarity to the edit strand both pre- and post-edit; a PE3b ngRNA spacer has perfect complementarity to the edit strand post-edit; and a PE3* spacer has perfect complementarity to the edit strand post-edit with a PEgRNA containing an edit template encoding a PAM silencing mutation. Because some PAMs can be silenced by more than 1 synonymous mutation, edit templates (RTTs) encoding a PAM silencing mutation and ngRNA spacers having 100% complementary with the portion of the edit strand containing the encoded PAM silencing mutation are coded with a number following the asterisk (*). Exemplary ngRNA provided in Table 72 can comprise a sequence corresponding to sequence number 2011, 2012, 2013, 2015, 2016, 2060, 2061, 2062, 4091, 4105, 4106, 4110, or 4124.

[0486] Table 73 provides Prime Editing guide RNAs (PEgRNAs) that can be used with any Prime Editor containing a Cas9 protein capable of recognizing a AG PAM sequence. The PEgRNAs of Table 73 can also be used in Prime Editing systems further comprising a nick guide RNA (ngRNA). Such PEgRNAs and Prime Editing systems can be used, for example, to correct an R778L mutation in ATP7B.

[0487] The PEgRNAs exemplified in Table 73 comprise: (a) a spacer comprising at its 3′ end a sequence corresponding to sequence number 12947; (b) a gRNA core capable of complexing with a Cas9 protein, and (c) an extension arm comprising: (i) an editing template at least 10 nucleotides in length and comprising at its 3′ end a sequence corresponding to any one of sequence numbers 12969-12971, and (ii) a prime binding site (PBS) comprising at its 5′ end a sequence corresponding to sequence number 4135. The PEgRNA spacer can be, for example, 16-22 nucleotides in length and can comprise the sequence corresponding to any one of sequence numbers 12947-12953. In some embodiments, the PEgRNA spacer comprises sequence number 12951. The PEgRNA spacers in Table 73 are annotated with their PAM sequence(s), enabling the selection of an appropriate Cas9 protein. The editing template can be referred to as a reverse transcription template (RTT). The editing template can encode wildtype ATP7B gene sequence. For example, the editing template can comprise at its 3′ end the sequence corresponding to sequence number 12970, 12973, 12977, 12980, 12981, 12984, 12988, 12991, 12994, 12998, 12999, 13003, 13005, 13009, 13013, 13014, 13018, 13022, 13023, 13026, 13029, 13033, 13037, 13040, 13041, 13045, 13047, 13052, 13053, 13056, 13060, 13063, 13066, 13069, 13071, 13076, 13077, 13081, 13085, 13088, 13090, 13093, 13097, 13100, 13101, 13105, 13109, 13110, 13115, 13118, 13121, 13122, 13126, 13129, 13131, 13134, 13139, 13142, 13144, 13147, 13150, 13153, 13155, 13158, 13161, 13164, 13167, 13170, 13175, 13178, 13180, 13184, 13185, 13188, 13192, 13194, 13198, 13200, 13204, 13207, 13210, 13213, 13217, 13218, 13221, 13225, 13229, 13231, 13233, 13237, or 13240. Alternatively, the editing template can encode one or more synonymous mutations relative to the wildtype ATP7B gene. The editing template can encode one or more synonymous mutations that are PAM silencing mutations and can comprise at its 3′ end the sequence corresponding to sequence number 12969, 12971, 12972, 12974, 12975, 12976, 12978, 12979, 12982, 12983, 12985, 12986, 12987, 12989, 12990, 12992, 12993, 12995, 12996, 12997, 13000, 13001, 13002, 13004, 13006, 13007, 13008, 13010, 13011, 13012, 13015, 13016, 13017, 13019, 13020, 13021, 13024, 13025, 13027, 13028, 13030, 13031, 13032, 13034, 13035, 13036, 13038, 13039, 13042, 13043, 13044, 13046, 13048, 13049, 13050, 13051, 13054, 13055, 13057, 13058, 13059, 13061, 13062, 13064, 13065, 13067, 13068, 13070, 13072, 13073, 13074, 13075, 13078, 13079, 13080, 13082, 13083, 13084, 13086, 13087, 13089, 13091, 13092, 13094, 13095, 13096, 13098, 13099, 13102, 13103, 13104, 13106, 13107, 13108, 13111, 13112, 13113, 13114, 13116, 13117, 13119, 13120, 13123, 13124, 13125, 13127, 13128, 13130, 13132, 13133, 13135, 13136, 13137, 13138, 13140, 13141, 13143, 13145, 13146, 13148, 13149, 13151, 13152, 13154, 13156, 13157, 13159, 13160, 13162, 13163, 13165, 13166, 13168, 13169, 13171, 13172, 13173, 13174, 13176, 13177, 13179, 13181, 13182, 13183, 13186, 13187, 13189, 13190, 13191, 13193, 13195, 13196, 13197, 13199, 13201, 13202, 13203, 13205, 13206, 13208, 13209, 13211, 13212, 13214, 13215, 13216, 13219, 13220, 13222, 13223, 13224, 13226, 13227, 13228, 13230, 13232, 13234, 13235, 13236, 13238, 13239, or 13241. The PBS can be, for example, 3 to 19 nucleotides in length and can comprise the sequence corresponding to sequence number 4135, 7126, 12954, 12955, 12956, 12957, 12958, 12959, 12960, 12961, 12962, 12963, 12964, 12965, 12966, 12967, or 12968. In some cases, a PBS length of no more than 3 nucleotides less than the PEgRNA spacer length is chosen.

[0488] Any of the PEgRNAs of Table 73 can be used in a Prime Editing system further comprising a nick guide RNA (ngRNA). Such ngRNA can comprise a spacer comprising at its 3′ end a sequence corresponding to nucleotides 5-20 of any ngRNA spacer listed in Table 73 and a gRNA core capable of complexing with a Cas9 protein. For example, the sequence in the spacer of the ngRNA can comprise nucleotides 5-20, 4-20, 3-20, 2-20, or 1-20 of sequence number 1994, 2000, 2004, 2005, 2006, 2056, 2057, 2058, 2059, 2125, 2126, 2127, 3244, 3248, 3260, 3262, 3263, 3266, 3268, 3269, 3270, 3273, 3277, 3279, 3280, 3282, 3283, 3285, 3287, 3291, 3293, 3295, 13242, or 13243. In some embodiments, the spacer of the ngRNA is a ngRNA spacer listed in Table 73. The ngRNA spacers in Table 73 are annotated with their PAM sequences, enabling selection of an appropriate Cas9 protein. It can be advantageous to select a ngRNA spacer that has a PAM sequence compatible with the Cas9 protein used in the Prime Editor, thus avoiding the need to use two different Cas9 proteins. The ngRNA is capable of directing a complexed Cas9 protein to bind the edit strand of the ATP7B gene; thus, a complexed Cas9 nickase containing a nuclease inactivating mutation in the HNH domain will nick the non-edit strand. A PE3 ngRNA spacer has perfect complementarity to the edit strand both pre- and post-edit; a PE3b ngRNA spacer has perfect complementarity to the edit strand post-edit; and a PE3* spacer has perfect complementarity to the edit strand post-edit with a PEgRNA containing an edit template encoding a PAM silencing mutation. Because some PAMs can be silenced by more than 1 synonymous mutation, edit templates (RTTs) encoding a PAM silencing mutation and ngRNA spacers having 100% complementary with the portion of the edit strand containing the encoded PAM silencing mutation are coded with a number following the asterisk (*). Exemplary ngRNA provided in Table 73 can comprise a sequence corresponding to sequence number 2012, 2013, 2015, 2016, 2060, 2061, 2062, 4087, 4091, 4105, 4106, 4110, 4115, or 4124.

[0489] Table 74 provides Prime Editing guide RNAs (PEgRNAs) that can be used with any Prime Editor containing a Cas9 protein capable of recognizing a GG PAM sequence. The PEgRNAs of Table 74 can also be used in Prime Editing systems further comprising a nick guide RNA (ngRNA). Such PEgRNAs and Prime Editing systems can be used, for example, to correct an R778L mutation in ATP7B.

[0490] The PEgRNAs exemplified in Table 74 comprise: (a) a spacer comprising at its 3′ end a sequence corresponding to sequence number 13244; (b) a gRNA core capable of complexing with a Cas9 protein, and (c) an extension arm comprising: (i) an editing template at least 10 nucleotides in length and comprising at its 3′ end a sequence corresponding to any one of sequence numbers 13266-13269, and (ii) a prime binding site (PBS) comprising at its 5′ end a sequence corresponding to sequence number 5632. The PEgRNA spacer can be, for example, 16-22 nucleotides in length and can comprise the sequence corresponding to any one of sequence numbers 13244-13250. In some embodiments, the PEgRNA spacer comprises sequence number 13248. The PEgRNA spacers in Table 74 are annotated with their PAM sequence(s), enabling the selection of an appropriate Cas9 protein. The editing template can be referred to as a reverse transcription template (RTT). The editing template can encode wildtype ATP7B gene sequence. For example, the editing template can comprise at its 3′ end the sequence corresponding to sequence number 13268, 13272, 13275, 13281, 13284, 13289, 13292, 13294, 13301, 13303, 13308, 13311, 13315, 13321, 13322, 13328, 13333, 13336, 13338, 13345, 13346, 13353, 13354, 13360, 13364, 13368, 13370, 13376, 13380, 13382, 13387, 13393, 13395, 13399, 13403, 13408, 13412, 13416, 13420, 13422, 13428, 13430, 13435, 13441, 13443, 13447, 13453, 13456, 13461, 13462, 13467, 13472, 13474, 13480, 13483, 13486, 13492, 13494, 13500, 13504, 13507, 13513, 13515, 13520, 13522, 13527, 13533, 13534, 13539, 13543, 13548, 13553, 13557, 13559, 13563, 13567, 13572, 13574, 13581, 13584, 13586, 13591, 13597, 13599, 13604, 13608, 13613, 13617, 13618, 13625, or 13626. Alternatively, the editing template can encode one or more synonymous mutations relative to the wildtype ATP7B gene. The editing template can encode one or more synonymous mutations that are PAM silencing mutations and can comprise at its 3′ end the sequence corresponding to sequence number 13266, 13267, 13269, 13270, 13271, 13273, 13274, 13276, 13277, 13278, 13279, 13280, 13282, 13283, 13285, 13286, 13287, 13288, 13290, 13291, 13293, 13295, 13296, 13297, 13298, 13299, 13300, 13302, 13304, 13305, 13306, 13307, 13309, 13310, 13312, 13313, 13314, 13316, 13317, 13318, 13319, 13320, 13323, 13324, 13325, 13326, 13327, 13329, 13330, 13331, 13332, 13334, 13335, 13337, 13339, 13340, 13341, 13342, 13343, 13344, 13347, 13348, 13349, 13350, 13351, 13352, 13355, 13356, 13357, 13358, 13359, 13361, 13362, 13363, 13365, 13366, 13367, 13369, 13371, 13372, 13373, 13374, 13375, 13377, 13378, 13379, 13381, 13383, 13384, 13385, 13386, 13388, 13389, 13390, 13391, 13392, 13394, 133%, 13397, 13398, 13400, 13401, 13402, 13404, 13405, 13406, 13407, 13409, 13410, 13411, 13413, 13414, 13415, 13417, 13418, 13419, 13421, 13423, 13424, 13425, 13426, 13427, 13429, 13431, 13432, 13433, 13434, 13436, 13437, 13438, 13439, 13440, 13442, 13444, 13445, 13446, 13448, 13449, 13450, 13451, 13452, 13454, 13455, 13457, 13458, 13459, 13460, 13463, 13464, 13465, 13466, 13468, 13469, 13470, 13471, 13473, 13475, 13476, 13477, 13478, 13479, 13481, 13482, 13484, 13485, 13487, 13488, 13489, 13490, 13491, 13493, 13495, 134%, 13497, 13498, 13499, 13501, 13502, 13503, 13505, 13506, 13508, 13509, 13510, 13511, 13512, 13514, 13516, 13517, 13518, 13519, 13521, 13523, 13524, 13525, 13526, 13528, 13529, 13530, 13531, 13532, 13535, 13536, 13537, 13538, 13540, 13541, 13542, 13544, 13545, 13546, 13547, 13549, 13550, 13551, 13552, 13554, 13555, 13556, 13558, 13560, 13561, 13562, 13564, 13565, 13566, 13568, 13569, 13570, 13571, 13573, 13575, 13576, 13577, 13578, 13579, 13580, 13582, 13583, 13585, 13587, 13588, 13589, 13590, 13592, 13593, 13594, 13595, 135%, 13598, 13600, 13601, 13602, 13603, 13605, 13606, 13607, 13609, 13610, 13611, 13612, 13614, 13615, 13616, 13619, 13620, 13621, 13622, 13623, 13624, 13627, 13628, or 13629. The PBS can be, for example, 3 to 19 nucleotides in length and can comprise the sequence corresponding to sequence number 5632, 5633, 13251, 13252, 13253, 13254, 13255, 13256, 13257, 13258, 13259, 13260, 13261, 13262, 13263, 13264, or 13265. In some cases, a PBS length of no more than 3 nucleotides less than the PEgRNA spacer length is chosen.

[0491] Any of the PEgRNAs of Table 74 can be used in a Prime Editing system further comprising a nick guide RNA (ngRNA). Such ngRNA can comprise a spacer comprising at its 3′ end a sequence corresponding to nucleotides 5-20 of any ngRNA spacer listed in Table 74 and a gRNA core capable of complexing with a Cas9 protein. For example, the sequence in the spacer of the ngRNA can comprise nucleotides 5-20, 4-20, 3-20, 2-20, or 1-20 of sequence number 1994, 2000, 2004, 2006, 2056, 2057, 2058, 2059, 2125, 2126, 2127, 3244, 3247, 3248, 3260, 3262, 3263, 3264, 3266, 3268, 3269, 3270, 3271, 3272, 3273, 3275, 3277, 3278, 3279, 3280, 3282, 3283, 3285, 3287, 3291, 3293, 3295, 3297, 3299, 13630, 13631, 13632, 13633, 13634, or 13635. In some embodiments, the spacer of the ngRNA is a ngRNA spacer listed in Table 74. The ngRNA spacers in Table 74 are annotated with their PAM sequences, enabling selection of an appropriate Cas9 protein. It can be advantageous to select a ngRNA spacer that has a PAM sequence compatible with the Cas9 protein used in the Prime Editor, thus avoiding the need to use two different Cas9 proteins. The ngRNA is capable of directing a complexed Cas9 protein to bind the edit strand of the ATP7B gene; thus, a complexed Cas9 nickase containing a nuclease inactivating mutation in the HNH domain will nick the non-edit strand. A PE3 ngRNA spacer has perfect complementarity to the edit strand both pre- and post-edit; a PE3b ngRNA spacer has perfect complementarity to the edit strand post-edit; and a PE3* spacer has perfect complementarity to the edit strand post-edit with a PEgRNA containing an edit template encoding a PAM silencing mutation. Because some PAMs can be silenced by more than 1 synonymous mutation, edit templates (RTTs) encoding a PAM silencing mutation and ngRNA spacers having 100% complementary with the portion of the edit strand containing the encoded PAM silencing mutation are coded with a number following the asterisk (*). Exemplary ngRNA provided in Table 74 can comprise a sequence corresponding to sequence number 2012, 2013, 2015, 2016, 2060, 2061, 2062, 4085, 4086, 4087, 4090, 4091, 4099, 4100, 4101, 4105, 4106, 4108, 4110, 4113, 4115, 4117, 4118, 4120, 4122, 4123, 4124, or 4125.

[0492] Table 75 provides Prime Editing guide RNAs (PEgRNAs) that can be used with any Prime Editor containing a Cas9 protein capable of recognizing a CTGG PAM sequence. The PEgRNAs of Table 75 can also be used in Prime Editing systems further comprising a nick guide RNA (ngRNA). Such PEgRNAs and Prime Editing systems can be used, for example, to correct an R778L mutation in ATP7B.

[0493] The PEgRNAs exemplified in Table 75 comprise: (a) a spacer comprising at its 3′ end a sequence corresponding to sequence number 13636; (b) a gRNA core capable of complexing with a Cas9 protein, and (c) an extension arm comprising: (i) an editing template at least 95 nucleotides in length and comprising at its 3′ end a sequence corresponding to any one of sequence numbers 13660-13664, and (ii) a prime binding site (PBS) comprising at its 5′ end a sequence corresponding to sequence number 13643. The PEgRNA spacer can be, for example, 16-22 nucleotides in length and can comprise the sequence corresponding to any one of sequence numbers 13636-13642. In some embodiments, the PEgRNA spacer comprises sequence number 13640. The PEgRNA spacers in Table 75 are annotated with their PAM sequence(s), enabling the selection of an appropriate Cas9 protein. The editing template can be referred to as a reverse transcription template (RTT). The editing template can encode wildtype ATP7B gene sequence. For example, the editing template can comprise at its 3′ end the sequence corresponding to sequence number 13663, 13665, 13672, 13679, 13683, or 13689. Alternatively, the editing template can encode one or more synonymous mutations relative to the wildtype ATP7B gene. The editing template can encode one or more synonymous mutations that are PAM silencing mutations and can comprise at its 3′ end the sequence corresponding to sequence number 13660, 13661, 13662, 13664, 13666, 13667, 13668, 13669, 13670, 13671, 13673, 13674, 13675, 13676, 13677, 13678, 13680, 13681, 13682, 13684, 13685, 13686, 13687, or 13688. The PBS can be, for example, 3 to 19 nucleotides in length and can comprise the sequence corresponding to any one of sequence numbers 13643-13659. In some cases, a PBS length of no more than 3 nucleotides less than the PEgRNA spacer length is chosen.

[0494] Any of the PEgRNAs of Table 75 can be used in a Prime Editing system further comprising a nick guide RNA (ngRNA). Such ngRNA can comprise a spacer comprising at its 3′ end a sequence corresponding to nucleotides 5-20 of any ngRNA spacer listed in Table 75 and a gRNA core capable of complexing with a Cas9 protein. For example, the sequence in the spacer of the ngRNA can comprise nucleotides 5-20, 4-20, 3-20, 2-20, or 1-20 of sequence number 68, 76, 93, 95, 96, 98, 1224, 1227, 6449, 6455, or 6536. In some embodiments, the spacer of the ngRNA is a ngRNA spacer listed in Table 75. The ngRNA spacers in Table 75 are annotated with their PAM sequences, enabling selection of an appropriate Cas9 protein. It can be advantageous to select a ngRNA spacer that has a PAM sequence compatible with the Cas9 protein used in the Prime Editor, thus avoiding the need to use two different Cas9 proteins. The ngRNA is capable of directing a complexed Cas9 protein to bind the edit strand of the ATP7B gene; thus, a complexed Cas9 nickase containing a nuclease inactivating mutation in the HNH domain will nick the non-edit strand. A PE3 ngRNA spacer has perfect complementarity to the edit strand both pre- and post-edit; a PE3b ngRNA spacer has perfect complementarity to the edit strand post-edit; and a PE3* spacer has perfect complementarity to the edit strand post-edit with a PEgRNA containing an edit template encoding a PAM silencing mutation. Because some PAMs can be silenced by more than 1 synonymous mutation, edit templates (RTTs) encoding a PAM silencing mutation and ngRNA spacers having 100% complementary with the portion of the edit strand containing the encoded PAM silencing mutation are coded with a number following the asterisk (*). Exemplary ngRNA provided in Table 75 can comprise a sequence corresponding to sequence number 100, 101, 102, 104, 105, 109, 112, 113, or 117.

[0495] Table 76 provides Prime Editing guide RNAs (PEgRNAs) that can be used with any Prime Editor containing a Cas9 protein capable of recognizing a GTGG PAM sequence. The PEgRNAs of Table 76 can also be used in Prime Editing systems further comprising a nick guide RNA (ngRNA). Such PEgRNAs and Prime Editing systems can be used, for example, to correct an R778L mutation in ATP7B.

[0496] The PEgRNAs exemplified in Table 76 comprise: (a) a spacer comprising at its 3′ end a sequence corresponding to sequence number 13690; (b) a gRNA core capable of complexing with a Cas9 protein, and (c) an extension arm comprising: (i) an editing template at least 92 nucleotides in length and comprising at its 3′ end a sequence corresponding to any one of sequence numbers 13714-13717, and (ii) a prime binding site (PBS) comprising at its 5′ end a sequence corresponding to sequence number 13697. The PEgRNA spacer can be, for example, 16-22 nucleotides in length and can comprise the sequence corresponding to any one of sequence numbers 13690-13696. In some embodiments, the PEgRNA spacer comprises sequence number 13694. The PEgRNA spacers in Table 76 are annotated with their PAM sequence(s), enabling the selection of an appropriate Cas9 protein. The editing template can be referred to as a reverse transcription template (RTT). The editing template can encode wildtype ATP7B gene sequence. For example, the editing template can comprise at its 3′ end the sequence corresponding to sequence number 13716, 13718, 13724, 13727, 13732, 13736, 13740, 13743, or 13749. Alternatively, the editing template can encode one or more synonymous mutations relative to the wildtype ATP7B gene. The editing template can encode one or more synonymous mutations that are PAM silencing mutations and can comprise at its 3′ end the sequence corresponding to sequence number 13714, 13715, 13717, 13719, 13720, 13721, 13722, 13723, 13725, 13726, 13728, 13729, 13730, 13731, 13733, 13734, 13735, 13737, 13738, 13739, 13741, 13742, 13744, 13745, 13746, 13747, or 13748. The PBS can be, for example, 3 to 19 nucleotides in length and can comprise the sequence corresponding to any one of sequence numbers 13697-13713. In some cases, a PBS length of no more than 3 nucleotides less than the PEgRNA spacer length is chosen.

[0497] Any of the PEgRNAs of Table 76 can be used in a Prime Editing system further comprising a nick guide RNA (ngRNA). Such ngRNA can comprise a spacer comprising at its 3′ end a sequence corresponding to nucleotides 5-20 of any ngRNA spacer listed in Table 76 and a gRNA core capable of complexing with a Cas9 protein. For example, the sequence in the spacer of the ngRNA can comprise nucleotides 5-20, 4-20, 3-20, 2-20, or 1-20 of sequence number 68, 76, 93, 95, 96, 98, 1224, 1227, 6449, 6455, 6536, 9861, 9862, or 13750. In some embodiments, the spacer of the ngRNA is a ngRNA spacer listed in Table 76. The ngRNA spacers in Table 76 are annotated with their PAM sequences, enabling selection of an appropriate Cas9 protein. It can be advantageous to select a ngRNA spacer that has a PAM sequence compatible with the Cas9 protein used in the Prime Editor, thus avoiding the need to use two different Cas9 proteins. The ngRNA is capable of directing a complexed Cas9 protein to bind the edit strand of the ATP7B gene; thus, a complexed Cas9 nickase containing a nuclease inactivating mutation in the HNH domain will nick the non-edit strand. A PE3 ngRNA spacer has perfect complementarity to the edit strand both pre- and post-edit; a PE3b ngRNA spacer has perfect complementarity to the edit strand post-edit; and a PE3* spacer has perfect complementarity to the edit strand post-edit with a PEgRNA containing an edit template encoding a PAM silencing mutation. Because some PAMs can be silenced by more than 1 synonymous mutation, edit templates (RTTs) encoding a PAM silencing mutation and ngRNA spacers having 100% complementary with the portion of the edit strand containing the encoded PAM silencing mutation are coded with a number following the asterisk (*). Exemplary ngRNA provided in Table 76 can comprise a sequence corresponding to sequence number 100, 101, 102, 104, 105, 109, 112, 113, or 117.

[0498] Table 77 provides Prime Editing guide RNAs (PEgRNAs) that can be used with any Prime Editor containing a Cas9 protein capable of recognizing a GTGG PAM sequence. The PEgRNAs of Table 77 can also be used in Prime Editing systems further comprising a nick guide RNA (ngRNA). Such PEgRNAs and Prime Editing systems can be used, for example, to correct an R778L mutation in ATP7B.

[0499] The PEgRNAs exemplified in Table 77 comprise: (a) a spacer comprising at its 3′ end a sequence corresponding to sequence number 13751; (b) a gRNA core capable of complexing with a Cas9 protein, and (c) an extension arm comprising: (i) an editing template at least 83 nucleotides in length and comprising at its 3′ end a sequence corresponding to any one of sequence numbers 13774-13777, and (ii) a prime binding site (PBS) comprising at its 5′ end a sequence corresponding to sequence number 2024. The PEgRNA spacer can be, for example, 16-22 nucleotides in length and can comprise the sequence corresponding to any one of sequence numbers 13751-13757. In some embodiments, the PEgRNA spacer comprises sequence number 13755. The PEgRNA spacers in Table 77 are annotated with their PAM sequence(s), enabling the selection of an appropriate Cas9 protein. The editing template can be referred to as a reverse transcription template (RTT). The editing template can encode wildtype ATP7B gene sequence. For example, the editing template can comprise at its 3′ end the sequence corresponding to sequence number 13777, 13780, 13785, 13787, 13793, 13796, 13800, 13805, 13807, 13813, 13817, 13820, 13824, 13828, 13830, 13836, 13840, or 13845. Alternatively, the editing template can encode one or more synonymous mutations relative to the wildtype ATP7B gene. The editing template can encode one or more synonymous mutations that are PAM silencing mutations and can comprise at its 3′ end the sequence corresponding to sequence number 13774, 13775, 13776, 13778, 13779, 13781, 13782, 13783, 13784, 13786, 13788, 13789, 13790, 13791, 13792, 13794, 13795, 13797, 13798, 13799, 13801, 13802, 13803, 13804, 13806, 13808, 13809, 13810, 13811, 13812, 13814, 13815, 13816, 13818, 13819, 13821, 13822, 13823, 13825, 13826, 13827, 13829, 13831, 13832, 13833, 13834, 13835, 13837, 13838, 13839, 13841, 13842, 13843, or 13844. The PBS can be, for example, 3 to 19 nucleotides in length and can comprise the sequence corresponding to sequence number 2024, 13758, 13759, 13760, 13761, 13762, 13763, 13764, 13765, 13766, 13767, 13768, 13769, 13770, 13771, 13772, or 13773. In some cases, a PBS length of no more than 3 nucleotides less than the PEgRNA spacer length is chosen.

[0500] Any of the PEgRNAs of Table 77 can be used in a Prime Editing system further comprising a nick guide RNA (ngRNA). Such ngRNA can comprise a spacer comprising at its 3′ end a sequence corresponding to nucleotides 5-20 of any ngRNA spacer listed in Table 77 and a gRNA core capable of complexing with a Cas9 protein. For example, the sequence in the spacer of the ngRNA can comprise nucleotides 5-20, 4-20, 3-20, 2-20, or 1-20 of sequence number 68, 76, 93, 95, 96, 98, 1224, 1227, 6449, or 6536. In some embodiments, the spacer of the ngRNA is a ngRNA spacer listed in Table 77. The ngRNA spacers in Table 77 are annotated with their PAM sequences, enabling selection of an appropriate Cas9 protein. It can be advantageous to select a ngRNA spacer that has a PAM sequence compatible with the Cas9 protein used in the Prime Editor, thus avoiding the need to use two different Cas9 proteins. The ngRNA is capable of directing a complexed Cas9 protein to bind the edit strand of the ATP7B gene; thus, a complexed Cas9 nickase containing a nuclease inactivating mutation in the HNH domain will nick the non-edit strand. A PE3 ngRNA spacer has perfect complementarity to the edit strand both pre- and post-edit; a PE3b ngRNA spacer has perfect complementarity to the edit strand post-edit; and a PE3* spacer has perfect complementarity to the edit strand post-edit with a PEgRNA containing an edit template encoding a PAM silencing mutation. Because some PAMs can be silenced by more than 1 synonymous mutation, edit templates (RTTs) encoding a PAM silencing mutation and ngRNA spacers having 100% complementary with the portion of the edit strand containing the encoded PAM silencing mutation are coded with a number following the asterisk (*). Exemplary ngRNA provided in Table 77 can comprise a sequence corresponding to sequence number 100, 101, 102, 104, 105, 109, 112, 113, or 117.

[0501] Table 78 provides Prime Editing guide RNAs (PEgRNAs) that can be used with any Prime Editor containing a Cas9 protein capable of recognizing a GCGG PAM sequence. The PEgRNAs of Table 78 can also be used in Prime Editing systems further comprising a nick guide RNA (ngRNA). Such PEgRNAs and Prime Editing systems can be used, for example, to correct an R778L mutation in ATP7B.

[0502] The PEgRNAs exemplified in Table 78 comprise: (a) a spacer comprising at its 3′ end a sequence corresponding to sequence number 13846; (b) a gRNA core capable of complexing with a Cas9 protein, and (c) an extension arm comprising: (i) an editing template at least 71 nucleotides in length and comprising at its 3′ end a sequence corresponding to any one of sequence numbers 13868-13871, and (ii) a prime binding site (PBS) comprising at its 5′ end a sequence corresponding to sequence number 10073. The PEgRNA spacer can be, for example, 16-22 nucleotides in length and can comprise the sequence corresponding to any one of sequence numbers 13846-13852. In some embodiments, the PEgRNA spacer comprises sequence number 13850. The PEgRNA spacers in Table 78 are annotated with their PAM sequence(s), enabling the selection of an appropriate Cas9 protein. The editing template can be referred to as a reverse transcription template (RTT). The editing template can encode wildtype ATP7B gene sequence. For example, the editing template can comprise at its 3′ end the sequence corresponding to sequence number 13870, 13874, 13877, 13883, 13887, 13888, 13892, 13898, 13903, 13906, 13908, 13912, 13918, 13922, 13924, 13930, 13935, 13938, 13941, 13946, 13951, 13953, 13956, 13%2, 13967, 13971, 13975, 13978, 13980, or 13985. Alternatively, the editing template can encode one or more synonymous mutations relative to the wildtype ATP7B gene. The editing template can encode one or more synonymous mutations that are PAM silencing mutations and can comprise at its 3′ end the sequence corresponding to sequence number 13868, 13869, 13871, 13872, 13873, 13875, 13876, 13878, 13879, 13880, 13881, 13882, 13884, 13885, 13886, 13889, 13890, 13891, 13893, 13894, 13895, 13896, 13897, 13899, 13900, 13901, 13902, 13904, 13905, 13907, 13909, 13910, 13911, 13913, 13914, 13915, 13916, 13917, 13919, 13920, 13921, 13923, 13925, 13926, 13927, 13928, 13929, 13931, 13932, 13933, 13934, 13936, 13937, 13939, 13940, 13942, 13943, 13944, 13945, 13947, 13948, 13949, 13950, 13952, 13954, 13955, 13957, 13958, 13959, 13960, 13961, 13963, 13964, 13965, 13966, 13%8, 13%9, 13970, 13972, 13973, 13974, 13976, 13977, 13979, 13981, 13982, 13983, 13984, 13986, or 13987. The PBS can be, for example, 3 to 19 nucleotides in length and can comprise the sequence corresponding to sequence number 10073, 12110, 13853, 13854, 13855, 13856, 13857, 13858, 13859, 13860, 13861, 13862, 13863, 13864, 13865, 13866, or 13867. In some cases, a PBS length of no more than 3 nucleotides less than the PEgRNA spacer length is chosen.

[0503] Any of the PEgRNAs of Table 78 can be used in a Prime Editing system further comprising a nick guide RNA (ngRNA). Such ngRNA can comprise a spacer comprising at its 3′ end a sequence corresponding to nucleotides 5-20 of any ngRNA spacer listed in Table 78 and a gRNA core capable of complexing with a Cas9 protein. For example, the sequence in the spacer of the ngRNA can comprise nucleotides 5-20, 4-20, 3-20, 2-20, or 1-20 of sequence number 68, 76, 93, 95, %, 98, 1224, 1227, 6449, or 6536. In some embodiments, the spacer of the ngRNA is a ngRNA spacer listed in Table 78. The ngRNA spacers in Table 78 are annotated with their PAM sequences, enabling selection of an appropriate Cas9 protein. It can be advantageous to select a ngRNA spacer that has a PAM sequence compatible with the Cas9 protein used in the Prime Editor, thus avoiding the need to use two different Cas9 proteins. The ngRNA is capable of directing a complexed Cas9 protein to bind the edit strand of the ATP7B gene; thus, a complexed Cas9 nickase containing a nuclease inactivating mutation in the HNH domain will nick the non-edit strand. A PE3 ngRNA spacer has perfect complementarity to the edit strand both pre- and post-edit; a PE3b ngRNA spacer has perfect complementarity to the edit strand post-edit; and a PE3* spacer has perfect complementarity to the edit strand post-edit with a PEgRNA containing an edit template encoding a PAM silencing mutation. Because some PAMs can be silenced by more than 1 synonymous mutation, edit templates (RTTs) encoding a PAM silencing mutation and ngRNA spacers having 100% complementary with the portion of the edit strand containing the encoded PAM silencing mutation are coded with a number following the asterisk (*). Exemplary ngRNA provided in Table 78 can comprise a sequence corresponding to sequence number 100, 101, 102, 104, 105, 109, 112, 113, or 117.

[0504] Table 79 provides Prime Editing guide RNAs (PEgRNAs) that can be used with any Prime Editor containing a Cas9 protein capable of recognizing a CTGG PAM sequence. The PEgRNAs of Table 79 can also be used in Prime Editing systems further comprising a nick guide RNA (ngRNA). Such PEgRNAs and Prime Editing systems can be used, for example, to correct an R778L mutation in ATP7B.

[0505] The PEgRNAs exemplified in Table 79 comprise: (a) a spacer comprising at its 3′ end a sequence corresponding to sequence number 13988; (b) a gRNA core capable of complexing with a Cas9 protein, and (c) an extension arm comprising: (i) an editing template at least 11 nucleotides in length and comprising at its 3′ end a sequence corresponding to any one of sequence numbers 14010-14014, and (ii) a prime binding site (PBS) comprising at its 5′ end a sequence corresponding to sequence number 5849. The PEgRNA spacer can be, for example, 16-22 nucleotides in length and can comprise the sequence corresponding to any one of sequence numbers 13988-13994. In some embodiments, the PEgRNA spacer comprises sequence number 13992. The PEgRNA spacers in Table 79 are annotated with their PAM sequence(s), enabling the selection of an appropriate Cas9 protein. The editing template can be referred to as a reverse transcription template (RTT). The editing template can encode wildtype ATP7B gene sequence. For example, the editing template can comprise at its 3′ end the sequence corresponding to sequence number 14010, 14016, 14024, 14026, 14030, 14038, 14041, 14046, 14051, 14059, 14062, 14065, 14074, 14079, 14083, 14087, 14090, 14096, 14100, 14109, 14114, 14115, 14121, 14126, 14133, 14139, 14141, 14148, 14153, 14158, 14162, 14169, 14172, 14175, 14184, 14188, 14190, 14197, 14202, 14205, 14212, 14217, 14224, 14229, 14233, 14236, 14243, 14248, 14254, 14259, 14260, 14267, 14272, 14277, 14280, 14289, 14294, 14295, 14303, 14309, 14314, 14318, 14321, 14326, 14331, 14335, 14343, 14345, 14354, 14356, 14363, 14366, 14373, 14376, 14383, 14388, 14392, 14398, 14403, 14407, 14412, 14417, 14424, 14429, 14431, 14436, 14442, 14446, 14453, or 14458. Alternatively, the editing template can encode one or more synonymous mutations relative to the wildtype ATP7B gene. The editing template can encode one or more synonymous mutations that are PAM silencing mutations and can comprise at its 3′ end the sequence corresponding to sequence number 14011, 14012, 14013, 14014, 14015, 14017, 14018, 14019, 14020, 14021, 14022, 14023, 14025, 14027, 14028, 14029, 14031, 14032, 14033, 14034, 14035, 14036, 14037, 14039, 14040, 14042, 14043, 14044, 14045, 14047, 14048, 14049, 14050, 14052, 14053, 14054, 14055, 14056, 14057, 14058, 14060, 14061, 14063, 14064, 14066, 14067, 14068, 14069, 14070, 14071, 14072, 14073, 14075, 14076, 14077, 14078, 14080, 14081, 14082, 14084, 14085, 14086, 14088, 14089, 14091, 14092, 14093, 14094, 14095, 14097, 14098, 14099, 14101, 14102, 14103, 14104, 14105, 14106, 14107, 14108, 14110, 14111, 14112, 14113, 14116, 14117, 14118, 14119, 14120, 14122, 14123, 14124, 14125, 14127, 14128, 14129, 14130, 14131, 14132, 14134, 14135, 14136, 14137, 14138, 14140, 14142, 14143, 14144, 14145, 14146, 14147, 14149, 14150, 14151, 14152, 14154, 14155, 14156, 14157, 14159, 14160, 14161, 14163, 14164, 14165, 14166, 14167, 14168, 14170, 14171, 14173, 14174, 14176, 14177, 14178, 14179, 14180, 14181, 14182, 14183, 14185, 14186, 14187, 14189, 14191, 14192, 14193, 14194, 14195, 14196, 14198, 14199, 14200, 14201, 14203, 14204, 14206, 14207, 14208, 14209, 14210, 14211, 14213, 14214, 14215, 14216, 14218, 14219, 14220, 14221, 14222, 14223, 14225, 14226, 14227, 14228, 14230, 14231, 14232, 14234, 14235, 14237, 14238, 14239, 14240, 14241, 14242, 14244, 14245, 14246, 14247, 14249, 14250, 14251, 14252, 14253, 14255, 14256, 14257, 14258, 14261, 14262, 14263, 14264, 14265, 14266, 14268, 14269, 14270, 14271, 14273, 14274, 14275, 14276, 14278, 14279, 14281, 14282, 14283, 14284, 14285, 14286, 14287, 14288, 14290, 14291, 14292, 14293, 14296, 14297, 14298, 14299, 14300, 14301, 14302, 14304, 14305, 14306, 14307, 14308, 14310, 14311, 14312, 14313, 14315, 14316, 14317, 14319, 14320, 14322, 14323, 14324, 14325, 14327, 14328, 14329, 14330, 14332, 14333, 14334, 14336, 14337, 14338, 14339, 14340, 14341, 14342, 14344, 14346, 14347, 14348, 14349, 14350, 14351, 14352, 14353, 14355, 14357, 14358, 14359, 14360, 14361, 14362, 14364, 14365, 14367, 14368, 14369, 14370, 14371, 14372, 14374, 14375, 14377, 14378, 14379, 14380, 14381, 14382, 14384, 14385, 14386, 14387, 14389, 14390, 14391, 14393, 14394, 14395, 14396, 14397, 14399, 14400, 14401, 14402, 14404, 14405, 14406, 14408, 14409, 14410, 14411, 14413, 14414, 14415, 14416, 14418, 14419, 14420, 14421, 14422, 14423, 14425, 14426, 14427, 14428, 14430, 14432, 14433, 14434, 14435, 14437, 14438, 14439, 14440, 14441, 14443, 14444, 14445, 14447, 14448, 14449, 14450, 14451, 14452, 14454, 14455, 14456, 14457, or 14459. The PBS can be, for example, 3 to 19 nucleotides in length and can comprise the sequence corresponding to sequence number 5849, 5850, 13995, 13996, 13997, 13998, 13999, 14000, 14001, 14002, 14003, 14004, 14005, 14006, 14007, 14008, or 14009. In some cases, a PBS length of no more than 3 nucleotides less than the PEgRNA spacer length is chosen.

[0506] Any of the PEgRNAs of Table 79 can be used in a Prime Editing system further comprising a nick guide RNA (ngRNA). Such ngRNA can comprise a spacer comprising at its 3′ end a sequence corresponding to nucleotides 5-20 of any ngRNA spacer listed in Table 79 and a gRNA core capable of complexing with a Cas9 protein. For example, the sequence in the spacer of the ngRNA can comprise nucleotides 5-20, 4-20, 3-20, 2-20, or 1-20 of sequence number 93, 1216, 1224, 1225, 1226, 1227, 1236, or 1244. In some embodiments, the spacer of the ngRNA is a ngRNA spacer listed in Table 79. The ngRNA spacers in Table 79 are annotated with their PAM sequences, enabling selection of an appropriate Cas9 protein. It can be advantageous to select a ngRNA spacer that has a PAM sequence compatible with the Cas9 protein used in the Prime Editor, thus avoiding the need to use two different Cas9 proteins. The ngRNA is capable of directing a complexed Cas9 protein to bind the edit strand of the ATP7B gene; thus, a complexed Cas9 nickase containing a nuclease inactivating mutation in the HNH domain will nick the non-edit strand. A PE3 ngRNA spacer has perfect complementarity to the edit strand both pre- and post-edit; a PE3b ngRNA spacer has perfect complementarity to the edit strand post-edit; and a PE3* spacer has perfect complementarity to the edit strand post-edit with a PEgRNA containing an edit template encoding a PAM silencing mutation. Because some PAMs can be silenced by more than 1 synonymous mutation, edit templates (RTTs) encoding a PAM silencing mutation and ngRNA spacers having 100% complementary with the portion of the edit strand containing the encoded PAM silencing mutation are coded with a number following the asterisk (*). Exemplary ngRNA provided in Table 79 can comprise a sequence corresponding to sequence number 104 or 117.

[0507] Table 80 provides Prime Editing guide RNAs (PEgRNAs) that can be used with any Prime Editor containing a Cas9 protein capable of recognizing a GTGG PAM sequence. The PEgRNAs of Table 80 can also be used in Prime Editing systems further comprising a nick guide RNA (ngRNA). Such PEgRNAs and Prime Editing systems can be used, for example, to correct an R778L mutation in ATP7B.

[0508] The PEgRNAs exemplified in Table 80 comprise: (a) a spacer comprising at its 3′ end a sequence corresponding to sequence number 14460; (b) a gRNA core capable of complexing with a Cas9 protein, and (c) an extension arm comprising: (i) an editing template at least 10 nucleotides in length and comprising at its 3′ end a sequence corresponding to sequence number 14484, and (ii) a prime binding site (PBS) comprising at its 5′ end a sequence corresponding to sequence number 14467. The PEgRNA spacer can be, for example, 16-22 nucleotides in length and can comprise the sequence corresponding to any one of sequence numbers 14460-14466. In some embodiments, the PEgRNA spacer comprises sequence number 14464. The PEgRNA spacers in Table 80 are annotated with their PAM sequence(s), enabling the selection of an appropriate Cas9 protein. The editing template can be referred to as a reverse transcription template (RTT). The editing template can encode wildtype ATP7B gene sequence. For example, the editing template can comprise at its 3′ end the sequence corresponding to any one of sequence numbers 14484-14574. Alternatively, the editing template can encode one or more synonymous mutations relative to the wildtype ATP7B gene. The PBS can be, for example, 3 to 19 nucleotides in length and can comprise the sequence corresponding to any one of sequence numbers 14467-14483. In some cases, a PBS length of no more than 3 nucleotides less than the PEgRNA spacer length is chosen.

[0509] Any of the PEgRNAs of Table 80 can be used in a Prime Editing system further comprising a nick guide RNA (ngRNA). Such ngRNA can comprise a spacer comprising at its 3′ end a sequence corresponding to nucleotides 5-20 of any ngRNA spacer listed in Table 80 and a gRNA core capable of complexing with a Cas9 protein. For example, the sequence in the spacer of the ngRNA can comprise nucleotides 5-20, 4-20, 3-20, 2-20, or 1-20 of sequence number 93, 1216, 1224, 1227, 1244, or 14575. In some embodiments, the spacer of the ngRNA is a ngRNA spacer listed in Table 80. The ngRNA spacers in Table 80 are annotated with their PAM sequences, enabling selection of an appropriate Cas9 protein. It can be advantageous to select a ngRNA spacer that has a PAM sequence compatible with the Cas9 protein used in the Prime Editor, thus avoiding the need to use two different Cas9 proteins. The ngRNA is capable of directing a complexed Cas9 protein to bind the edit strand of the ATP7B gene; thus, a complexed Cas9 nickase containing a nuclease inactivating mutation in the HNH domain will nick the non-edit strand. A PE3 ngRNA spacer has perfect complementarity to the edit strand both pre- and post-edit; a PE3b ngRNA spacer has perfect complementarity to the edit strand post-edit; and a PE3* spacer has perfect complementarity to the edit strand post-edit with a PEgRNA containing an edit template encoding a PAM silencing mutation. Because some PAMs can be silenced by more than 1 synonymous mutation, edit templates (RTTs) encoding a PAM silencing mutation and ngRNA spacers having 100% complementary with the portion of the edit strand containing the encoded PAM silencing mutation are coded with a number following the asterisk (*). Exemplary ngRNA provided in Table 80 can comprise a sequence corresponding to sequence number 104 or 117.

[0510] Table 81 provides Prime Editing guide RNAs (PEgRNAs) that can be used with any Prime Editor containing a Cas9 protein capable of recognizing a ATGG PAM sequence. The PEgRNAs of Table 81 can also be used in Prime Editing systems further comprising a nick guide RNA (ngRNA). Such PEgRNAs and Prime Editing systems can be used, for example, to correct an R778L mutation in ATP7B.

[0511] The PEgRNAs exemplified in Table 81 comprise: (a) a spacer comprising at its 3′ end a sequence corresponding to sequence number 14576; (b) a gRNA core capable of complexing with a Cas9 protein, and (c) an extension arm comprising: (i) an editing template at least 97 nucleotides in length and comprising at its 3′ end a sequence corresponding to sequence number 14600, and (ii) a prime binding site (PBS) comprising at its 5′ end a sequence corresponding to sequence number 14583. The PEgRNA spacer can be, for example, 16-22 nucleotides in length and can comprise the sequence corresponding to any one of sequence numbers 14576-14582. In some embodiments, the PEgRNA spacer comprises sequence number 14580. The PEgRNA spacers in Table 81 are annotated with their PAM sequence(s), enabling the selection of an appropriate Cas9 protein. The editing template can be referred to as a reverse transcription template (RTT). The editing template can encode wildtype ATP7B gene sequence. For example, the editing template can comprise at its 3′ end the sequence corresponding to any one of sequence numbers 14600-14603. Alternatively, the editing template can encode one or more synonymous mutations relative to the wildtype ATP7B gene. The PBS can be, for example, 3 to 19 nucleotides in length and can comprise the sequence corresponding to any one of sequence numbers 14583-14599. In some cases, a PBS length of no more than 3 nucleotides less than the PEgRNA spacer length is chosen.

[0512] Any of the PEgRNAs of Table 81 can be used in a Prime Editing system further comprising a nick guide RNA (ngRNA). Such ngRNA can comprise a spacer comprising at its 3′ end a sequence corresponding to nucleotides 5-20 of any ngRNA spacer listed in Table 81 and a gRNA core capable of complexing with a Cas9 protein. For example, the sequence in the spacer of the ngRNA can comprise nucleotides 5-20, 4-20, 3-20, 2-20, or 1-20 of sequence number 7112, 7117, 7156, 7157, or 7159. In some embodiments, the spacer of the ngRNA is a ngRNA spacer listed in Table 81. The ngRNA spacers in Table 81 are annotated with their PAM sequences, enabling selection of an appropriate Cas9 protein. It can be advantageous to select a ngRNA spacer that has a PAM sequence compatible with the Cas9 protein used in the Prime Editor, thus avoiding the need to use two different Cas9 proteins. The ngRNA is capable of directing a complexed Cas9 protein to bind the edit strand of the ATP7B gene; thus, a complexed Cas9 nickase containing a nuclease inactivating mutation in the HNH domain will nick the non-edit strand. A PE3 ngRNA spacer has perfect complementarity to the edit strand both pre- and post-edit; a PE3b ngRNA spacer has perfect complementarity to the edit strand post-edit; and a PE3* spacer has perfect complementarity to the edit strand post-edit with a PEgRNA containing an edit template encoding a PAM silencing mutation. Because some PAMs can be silenced by more than 1 synonymous mutation, edit templates (RTTs) encoding a PAM silencing mutation and ngRNA spacers having 100% complementary with the portion of the edit strand containing the encoded PAM silencing mutation are coded with a number following the asterisk (*).

[0513] Table 82 provides Prime Editing guide RNAs (PEgRNAs) that can be used with any Prime Editor containing a Cas9 protein capable of recognizing a CCTGGT PAM sequence. The PEgRNAs of Table 82 can also be used in Prime Editing systems further comprising a nick guide RNA (ngRNA). Such PEgRNAs and Prime Editing systems can be used, for example, to correct an R778L mutation in ATP7B.

[0514] The PEgRNAs exemplified in Table 82 comprise: (a) a spacer comprising at its 3′ end a sequence corresponding to sequence number 14604; (b) a gRNA core capable of complexing with a Cas9 protein, and (c) an extension arm comprising: (i) an editing template at least 96 nucleotides in length and comprising at its 3′ end a sequence corresponding to any one of sequence numbers 14625-14627, and (ii) a prime binding site (PBS) comprising at its 5′ end a sequence corresponding to sequence number 7082. The PEgRNA spacer can be, for example, 16-22 nucleotides in length and can comprise the sequence corresponding to any one of sequence numbers 14604-14610. In some embodiments, the PEgRNA spacer comprises sequence number 14608. The PEgRNA spacers in Table 82 are annotated with their PAM sequence(s), enabling the selection of an appropriate Cas9 protein. The editing template can be referred to as a reverse transcription template (RTT). The editing template can encode wildtype ATP7B gene sequence. For example, the editing template can comprise at its 3′ end the sequence corresponding to sequence number 14626, 14630, 14631, 14636, or 14637. Alternatively, the editing template can encode one or more synonymous mutations relative to the wildtype ATP7B gene. The editing template can encode one or more synonymous mutations that are PAM silencing mutations and can comprise at its 3′ end the sequence corresponding to sequence number 14625, 14627, 14628, 14629, 14632, 14633, 14634, 14635, 14638, or 14639. The PBS can be, for example, 3 to 19 nucleotides in length and can comprise the sequence corresponding to sequence number 7082, 7083, 9905, 14611, 14612, 14613, 14614, 14615, 14616, 14617, 14618, 14619, 14620, 14621, 14622, 14623, or 14624. In some cases, a PBS length of no more than 3 nucleotides less than the PEgRNA spacer length is chosen.

[0515] Any of the PEgRNAs of Table 82 can be used in a Prime Editing system further comprising a nick guide RNA (ngRNA). Such ngRNA can comprise a spacer comprising at its 3′ end a sequence corresponding to nucleotides 5-20 of any ngRNA spacer listed in Table 82 and a gRNA core capable of complexing with a Cas9 protein. For example, the sequence in the spacer of the ngRNA can comprise nucleotides 5-20, 4-20, 3-20, 2-20, or 1-20 of sequence number 70, 6453, or 6455. In some embodiments, the spacer of the ngRNA is a ngRNA spacer listed in Table 82. The ngRNA spacers in Table 82 are annotated with their PAM sequences, enabling selection of an appropriate Cas9 protein. It can be advantageous to select a ngRNA spacer that has a PAM sequence compatible with the Cas9 protein used in the Prime Editor, thus avoiding the need to use two different Cas9 proteins. The ngRNA is capable of directing a complexed Cas9 protein to bind the edit strand of the ATP7B gene; thus, a complexed Cas9 nickase containing a nuclease inactivating mutation in the HNH domain will nick the non-edit strand. A PE3 ngRNA spacer has perfect complementarity to the edit strand both pre- and post-edit; a PE3b ngRNA spacer has perfect complementarity to the edit strand post-edit; and a PE3* spacer has perfect complementarity to the edit strand post-edit with a PEgRNA containing an edit template encoding a PAM silencing mutation. Because some PAMs can be silenced by more than 1 synonymous mutation, edit templates (RTTs) encoding a PAM silencing mutation and ngRNA spacers having 100% complementary with the portion of the edit strand containing the encoded PAM silencing mutation are coded with a number following the asterisk (*).

[0516] Table 83 provides Prime Editing guide RNAs (PEgRNAs) that can be used with any Prime Editor containing a Cas9 protein capable of recognizing a CATGGT PAM sequence. The PEgRNAs of Table 83 can also be used in Prime Editing systems further comprising a nick guide RNA (ngRNA). Such PEgRNAs and Prime Editing systems can be used, for example, to correct an R778L mutation in ATP7B.

[0517] The PEgRNAs exemplified in Table 83 comprise: (a) a spacer comprising at its 3′ end a sequence corresponding to sequence number 14640; (b) a gRNA core capable of complexing with a Cas9 protein, and (c) an extension arm comprising: (i) an editing template at least 98 nucleotides in length and comprising at its 3′ end a sequence corresponding to sequence number 14663, and (ii) a prime binding site (PBS) comprising at its 5′ end a sequence corresponding to sequence number 10833. The PEgRNA spacer can be, for example, 16-22 nucleotides in length and can comprise the sequence corresponding to any one of sequence numbers 14640-14646. In some embodiments, the PEgRNA spacer comprises sequence number 14644. The PEgRNA spacers in Table 83 are annotated with their PAM sequence(s), enabling the selection of an appropriate Cas9 protein. The editing template can be referred to as a reverse transcription template (RTT). The editing template can encode wildtype ATP7B gene sequence. For example, the editing template can comprise at its 3′ end the sequence corresponding to any one of sequence numbers 14663-14665. Alternatively, the editing template can encode one or more synonymous mutations relative to the wildtype ATP7B gene. The PBS can be, for example, 3 to 19 nucleotides in length and can comprise the sequence corresponding to sequence number 10833, 14647, 14648, 14649, 14650, 14651, 14652, 14653, 14654, 14655, 14656, 14657, 14658, 14659, 14660, 14661, or 14662. In some cases, a PBS length of no more than 3 nucleotides less than the PEgRNA spacer length is chosen.

[0518] Any of the PEgRNAs of Table 83 can be used in a Prime Editing system further comprising a nick guide RNA (ngRNA). Such ngRNA can comprise a spacer comprising at its 3′ end a sequence corresponding to nucleotides 5-20 of any ngRNA spacer listed in Table 83 and a gRNA core capable of complexing with a Cas9 protein. For example, the sequence in the spacer of the ngRNA can comprise nucleotides 5-20, 4-20, 3-20, 2-20, or 1-20 of sequence number 5999, 6000, 6001, 6002, or 6454. In some embodiments, the spacer of the ngRNA is a ngRNA spacer listed in Table 83. The ngRNA spacers in Table 83 are annotated with their PAM sequences, enabling selection of an appropriate Cas9 protein. It can be advantageous to select a ngRNA spacer that has a PAM sequence compatible with the Cas9 protein used in the Prime Editor, thus avoiding the need to use two different Cas9 proteins. The ngRNA is capable of directing a complexed Cas9 protein to bind the edit strand of the ATP7B gene; thus, a complexed Cas9 nickase containing a nuclease inactivating mutation in the HNH domain will nick the non-edit strand. A PE3 ngRNA spacer has perfect complementarity to the edit strand both pre- and post-edit; a PE3b ngRNA spacer has perfect complementarity to the edit strand post-edit; and a PE3* spacer has perfect complementarity to the edit strand post-edit with a PEgRNA containing an edit template encoding a PAM silencing mutation. Because some PAMs can be silenced by more than 1 synonymous mutation, edit templates (RTTs) encoding a PAM silencing mutation and ngRNA spacers having 100% complementary with the portion of the edit strand containing the encoded PAM silencing mutation are coded with a number following the asterisk (*).

[0519] Table 84 provides Prime Editing guide RNAs (PEgRNAs) that can be used with any Prime Editor containing a Cas9 protein capable of recognizing a CCAAGT PAM sequence. The PEgRNAs of Table 84 can also be used in Prime Editing systems further comprising a nick guide RNA (ngRNA). Such PEgRNAs and Prime Editing systems can be used, for example, to correct an R778L mutation in ATP7B.

[0520] The PEgRNAs exemplified in Table 84 comprise: (a) a spacer comprising at its 3′ end a sequence corresponding to sequence number 14666; (b) a gRNA core capable of complexing with a Cas9 protein, and (c) an extension arm comprising: (i) an editing template at least 21 nucleotides in length and comprising at its 3′ end a sequence corresponding to sequence number 14689, and (ii) a prime binding site (PBS) comprising at its 5′ end a sequence corresponding to sequence number 9870. The PEgRNA spacer can be, for example, 16-22 nucleotides in length and can comprise the sequence corresponding to any one of sequence numbers 14666-14672. In some embodiments, the PEgRNA spacer comprises sequence number 14670. The PEgRNA spacers in Table 84 are annotated with their PAM sequence(s), enabling the selection of an appropriate Cas9 protein. The editing template can be referred to as a reverse transcription template (RTT). The editing template can encode wildtype ATP7B gene sequence. For example, the editing template can comprise at its 3′ end the sequence corresponding to any one of sequence numbers 14689-14768. Alternatively, the editing template can encode one or more synonymous mutations relative to the wildtype ATP7B gene. The PBS can be, for example, 3 to 19 nucleotides in length and can comprise the sequence corresponding to sequence number 9870, 14673, 14674, 14675, 14676, 14677, 14678, 14679, 14680, 14681, 14682, 14683, 14684, 14685, 14686, 14687, or 14688. In some cases, a PBS length of no more than 3 nucleotides less than the PEgRNA spacer length is chosen.

[0521] Any of the PEgRNAs of Table 84 can be used in a Prime Editing system further comprising a nick guide RNA (ngRNA). Such ngRNA can comprise a spacer comprising at its 3′ end a sequence corresponding to nucleotides 5-20 of any ngRNA spacer listed in Table 84 and a gRNA core capable of complexing with a Cas9 protein. For example, the sequence in the spacer of the ngRNA can comprise nucleotides 5-20, 4-20, 3-20, 2-20, or 1-20 of sequence number 5999. In some embodiments, the spacer of the ngRNA is a ngRNA spacer listed in Table 84. The ngRNA spacers in Table 84 are annotated with their PAM sequences, enabling selection of an appropriate Cas9 protein. It can be advantageous to select a ngRNA spacer that has a PAM sequence compatible with the Cas9 protein used in the Prime Editor, thus avoiding the need to use two different Cas9 proteins. The ngRNA is capable of directing a complexed Cas9 protein to bind the edit strand of the ATP7B gene; thus, a complexed Cas9 nickase containing a nuclease inactivating mutation in the HNH domain will nick the non-edit strand. A PE3 ngRNA spacer has perfect complementarity to the edit strand both pre- and post-edit; a PE3b ngRNA spacer has perfect complementarity to the edit strand post-edit; and a PE3* spacer has perfect complementarity to the edit strand post-edit with a PEgRNA containing an edit template encoding a PAM silencing mutation. Because some PAMs can be silenced by more than 1 synonymous mutation, edit templates (RTTs) encoding a PAM silencing mutation and ngRNA spacers having 100% complementary with the portion of the edit strand containing the encoded PAM silencing mutation are coded with a number following the asterisk (*).

[0522] In some embodiments, the PEgRNA and/or the ngRNA comprises a gRNA core, wherein the gRNA core comprises a sequence selected from SEQ ID Nos:14894-14896.

[0523] In some embodiments, a PEgRNA (or ngRNA) comprises an additional secondary structure at the 5′ end. In some embodiments, a PEgRNA (or ngRNA) comprises an additional secondary structure at the 3′ end.

[0524] In some embodiments, the secondary structure comprises a pseudoknot. In some embodiments, the secondary structure comprises a pseudoknot derived from a virus. In some embodiments, the secondary structure comprises a pseudoknot of a Moloney murine leukemia virus (M-MLV) genome (a mpknot). In some embodiments, the secondary structure comprises a nucleotide sequence selected from the group consisting of GGGUCAGGAGCCCCCCCCCUGAACCCAGGAUAACCCUCAAAGUCGGGGGGCAACC (SEQ ID No: 14921), GUCAGGGUCAGGAGCCCCCCCCCUGAACCCAGGAUAACCCUCAAAGUCGGGGGGCAACCC (SEQ ID No: 14922), GGGUCAGGAGCCCCCCCCCUGAACCCAGGAAAACCCUCAAAGUCGGGGGGCAACCC (SEQ ID No: 14923), GGGUCAGGAGCCCCCCCCCUGCACCCAGGAAAACCCUCAAAGUCGGGGGGCAACCC (SEQ ID No: 14924), GGGUCAGGAGCCCCCCCCCUGCACCCAGGAUAACCCUCAAAGUCGGGGGGCAACCC (SEQ ID No: 14925), GUCAGGGUCAGGAGCCCCCCCCCUGAACCCAGGAAAACCCUCAAAGUCGGGGGGCAACCC (SEQ ID No: 14926), GUCAGGGUCAGGAGCCCCCCCCCUGCACCCAGGAAAACCCUCAAAGUCGGGGGGCAACCC (SEQ ID No: 14927), and GGGUCAGGAGCCCCCCCCCUGAACCCAGGAUAACCCUCAAAGUCGGGGGGC (SEQ ID No: 14928), or a nucleotide sequence having at least 80%, 85%, 90%, 95%, 96%, 97%, 98%, or 99% sequence identity therewith. In some embodiments, the secondary structure comprises a nucleotide sequence ofGGGUCAGGAGCCCCCCCCCUGAACCCAGGAUAACCCUCAAAGUCGGGGGGC (SEQ ID No: 14928), or a nucleotide sequence having at least 80%, 85%, 90%, 95%, 96%, 97%, 98%, or 99% sequence identity therewith.

[0525] In some embodiments, the secondary structure comprises a quadruplex. In some embodiments, the secondary structure comprises a G-quadruplex. In some embodiments, the secondary structure comprises a nucleotide sequence selected from the group consisting of gq2(UGGUGGUGGUGGU) (SEQ ID No: 14929), stk40 (GGGACAGGGCAGGGACAGGG) (SEQ ID No: 14930), apc2 (GGGUCCGGGUCUGGGUCUGGG) (SEQ ID No: 14931), stard3 (GGGCAGGGUCUGGGCUGGG) (SEQ ID No: 14932), tns1 (GGGCUGGGAUGGGAAAGGG) (SEQ ID No: 14933), ceacam4 (GGGCUCUGGGUGGGCCGGG) (SEQ ID No: 14934), erc1 (GGGCUGGGCUGGGCAGGG) (SEQ ID No: 14935), pitpnm3 (GGGUGGGCUGGGAAGGG) (SEQ ID No: 14936), rlf (GGGAGGGAGGGCUAGGG) (SEQ ID No: 14937), ube3c (GGGCAGGGCUGGGAGGG) (SEQ ID No: 14938), taf15 (GGGUGGGAGGGCUGGG) (SEQ ID No: 14939), and xrn1 (GCGUAACCUCCAUCCGAGUUGCAAGAGAGGGAAACGCAGUCUC) (SEQ ID No: 14940), or a nucleotide sequence having at least 80%, 85%, 90%, 95%, 96%, 97%, 98%, or 99% sequence identity therewith.

[0526] In some embodiments, the secondary structure comprises a P4-P6 domain of a Group I intron. In some embodiments, the secondary structure comprises the nucleotide sequence of GGAAUUGCGGGAAAGGGGUCAACAGCCGUUCAGUACCAAGUCUCAGGGGAAACUUUGAG AUGGCCUUGCAAAGGGUAUGGUAAUAAGCUGACGGACAUGGUCCUAACCACGCAGCCAA GUCCUAAGUCAACAGAUCUUCUGUUGAUAUGGAUGCAGUUCA (SEQ ID No: 14941), or a nucleotide sequence having at least 80%, 85%, 90%, 95%, 96%, 97%, 98%, or 99% sequence identity therewith.

[0527] In some embodiments, the secondary structure comprises a riboswitch aptamer. In some embodiments, the secondary structure comprises a riboswitch aptamer derived from a prequeosine-1 riboswitch aptamer. In some embodiments, the secondary structure comprises a modified prequeosine-1 riboswitch aptamer. In some embodiments, the secondary structure comprises a nucleotide sequence selected from the group consisting of UUGACGCGGUUCUAUCUAGUUACGCGUUAAACCAACUAGAAA (SEQ ID No: 14942), UUGACGCGGUUCUAUCUACUUACGCGUUAAACCAACUAGAAA (SEQ ID No: 14943), CGCGAGUCUAGGGGAUAACGCGUUAAACUUCCUAGAAGGCGGUU (SEQ ID No: 14944), CGCGGAUCUAGAUUGUAACGCGUUAAACCAUCUAGAAGGCGGUU (SEQ ID No: 14945), CGCGUCGCUACCGCCCGGCGCGUUAAACACACUAGAAGGCGGUU (SEQ ID No: 14946), and CGCGGUUCUAUCUAGUUACGCGUUAAACCAACUAGAA (SEQ ID No: 14947), or a nucleotide sequence having at least 80%, 85%, 90%, 95%, 96%, 97%, 98%, or 99% sequence identity therewith. In some embodiments, the secondary structure comprises a nucleotide sequence selected from the group consisting of UUGACGCGGUUCUAUCUAGUUACGCGUUAAACCAACUAGAAA (SEQ ID No: 14942), CGCGAGUCUAGGGGAUAACGCGUUAAACUUCCUAGAAGGCGGUU (SEQ ID No: 14944), CGCGGAUCUAGAUUGUAACGCGUUAAACCAUCUAGAAGGCGGUU (SEQ ID No: 14945), CGCGUCGCUACCGCCCGGCGCGUUAAACACACUAGAAGGCGGUU (SEQ ID No: 14946), and CGCGGUUCUAUCUAGUUACGCGUUAAACCAACUAGAA (SEQ ID No: 14947), or a nucleotide sequence having at least 80%, 85%, 90%, 95%, 96%, 97%, 98%, or 99% sequence identity therewith. In some embodiments, the secondary structure comprises a nucleotide sequence of and CGCGGUUCUAUCUAGUUACGCGUUAAACCAACUAGAA (SEQ ID No: 14947), or a nucleotide sequence having at least 80%, 85%, 90%, 95%, 96%, 97%, 98%, or 99% sequence identity therewith.

[0528] In some embodiments, the secondary structure is linked to one or more other component of a PEgRNA via a linker. For example, in some embodiments, the secondary structure is at the 3′ end of the PEgRNA and is linked to the 3′ end of a PBS via a linker. In some embodiments, the secondary structure is at the 5′ end of the PEgRNA and is linked to the 5′ end of a spacer via a linker. In some embodiments, the linker is a nucleotide linker that is 1, 2, 3, 4, 5, 6, 7, 8, 9, 10, 11, 12, 13, 14, 15, 16, 17, 18, 19, 20, 21, 22, 23, 24, 25, 26, 27, 28, 29, 30, 31, 32, 33, 34, 35, 36, 37, 38, 39, 40, 41, 42, 43, 44, 45, 46, 47, 48, 49, or 50 nucleotides in length. In some embodiments, the linker is 5 to 10 nucleotides in length. In some embodiments, the linker is 10 to 20 nucleotides in length. In some embodiments, the linker is 15 to 25 nucleotides in length. In some embodiments, the linker is 8 nucleotides in length.

[0529] In some embodiments, the linker is designed to minimize base pairing between the linker and another component of the PEgRNA. In some embodiments, the linker is designed to minimize base pairing between the linker and the spacer. In some embodiments, the linker is designed to minimize base pairing between the linker and the PBS. In some embodiments, the linker is designed to minimize base pairing between the linker and the editing template. In some embodiments, the linker is designed to minimize base pairing between the linker and the sequence of the RNA secondary structure. In some embodiments, the linker is optimized to minimize base pairing between the linker and another component of the PEgRNA, in order of the following priority: spacer, PBS, editing template and then scaffold. In some embodiments, base paring probability is calculated using ViennaRNA 2.0, as described in Lorenz, R. et al. ViennaRNA package 2.0. Algorithms Mol. Biol. 6, incorporated by reference in its entirety herein, under standard parameters (37° C., 1 M NaCl, 0.05 M MgCl2).

[0530] In some embodiments, the PEgRNA comprises a RNA secondary structure and/or a linker disclosed in Nelson et al. Engineered pegRNAs improve prime editing efficiency. Nat Biotechnol. (2021), the entirety of which is incorporated herein by reference.

[0531] In some embodiments, a PEgRNA is transcribed from a nucleotide encoding the PEgRNA, for example, a DNA plasmid encoding the PEgRNA. In some embodiments, the PEgRNA comprises a self-cleaving element. In some embodiments, the self-cleaving element improves transcription and/or processing of the PEgRNA when transcribed form the nucleotide encoding the PEgRNA. In some embodiments, the PEgRNA comprises a hairpin or a RNA quadruplex. In some embodiments, the PEgRNA comprises a self-cleaving ribozyme element, for example, a hammerhead, a pistol, a hatchet, a hairpin, a VS, a twister, or a twister sister ribozyme. In some embodiments, the PEgRNA comprises a HDV ribozyme. In some embodiments, the PEgRNA comprises a hairpin recognized by Csy4. In some embodiments, the PEgRNA comprises an ENE motif. In some embodiments, the PEgRNA comprises an element for nuclear expression (ENE) from MALAT1 Inc RNA. In some embodiments, the PEgRNA comprises an ENE element from Kaposi's sarcoma-associated herpesvirus (KSHV). In some embodiments, the PEgRNA comprises a 3′ box of a U1 snRNA. In some embodiments, the PEgRNA forms a circular RNA.

[0532] In some embodiments, the PEgRNA comprises a RNA secondary structure or a motif that improves binding to the DNA-RNA duple or enhances PEgRNA activity. In some embodiments, the PEgRNA comprises a sequence derived from a native nucleotide element involved in reverse transcription, e.g., initiation of retroviral transcription. In some embodiments, the PEgRNA comprises a sequence of, or derived from, a primer binding site of a substrate of a reverse transcriptase, a polypurine tract (PPT), or a kissing loop. In some embodiments, the PEgRNA comprises a dimerization motif, a kissing loop, or a GNRA tetraloop-tetraloop receptor pair that results in circularization of the PEgRNA. In some embodiments, the PEgRNA comprises a RNA secondary structure of a motif that results in physical separation of the spacer and the PBS of the PEgRNA, thereby prevents occlusion of the spacer and improves PEgRNA activity. In some embodiments, the PEgRNA comprises a secondary structure or motif, e.g., a 5′ or 3′ extension in the spacer region that form a toehold or hairpin, wherein the secondary structure or motif competes favorably against annealing between the spacer and the PBS of the PEgRNA, thereby prevents occlusion of the spacer and improves PEgRNA activity.

[0533] In some embodiments, a PEgRNA comprises the sequence GGCCGGCAUGGUCCCAGCCUCCUCGCUGGCGCCGGCUGGGCAACAUGCUUCGGCAUGGCGA AUGGGAC (SEQ ID No: 14948) at the 3′ end. In some embodiments, a PEgRNA comprises the structure [spacer]-[gRNA core]-[editing template]-[PBS]-GGCCGGCAUGGUCCCAGCCUCCUCGCUGGCGCCGGCUGGGCAACAUGCUUCGGCAUGGCGA AUGGGAC (SEQ ID NO: 14948), or [spacer]-[gRNA core]-[editing template]-[PBS]-GGCCGGCAUGGUCCCAGCCUCCUCGCUGGCGCCGGCUGGGCAACAUGCUUCGGCAUGGCGA AUGGGA C-(U)n (SEQ ID NO: 14962), wherein n is an integer between 3 and 7. The structure derived from hepatitis D virus (HDV) is italicized.

[0534] In some embodiments, the PEgRNA comprises the sequence GGUGGGAGACGUCCCACC (SEQ ID No: 14949) at the 5′ end and/or the sequence UGGGAGACGUCCCACC (SEQ ID NO: 14963) at the 3′ end. In some embodiments, the PEgRNA comprises the following structure (M-MLV kissing loop): GGUGGGAGACGUCCCACC (SEQ ID NO: 14949)-[spacer]-[gRNA core]-[editing template]-[PBS]-UGGGAGACGUCCCACC (SEQ ID NO: 14963), or GGUGGGAGACGUCCCACC (SEQ ID NO: 14949)-[spacer]-[gRNA core]-[editing template]-[PBS]-UGGGAGACGUCCCACC-(U)n (SEQ ID NO: 14964), wherein n is an integer between 3 and 7. The kissing loop structure is italicized.

[0535] In some embodiments, the PEgRNA comprises the sequence GAGCAGCAUGGCGUCGCUGCUCAC (SEQ ID No: 14950) at the 5′ end and/or the sequence CCAUCAGUUGACACCCUGAGG (SEQ ID No: 14951) at the 3′ end. In some embodiments, the PEgRNA comprises the following structure (VS ribozyme kissing loop):

[0536] GAGCAGCAUGGCGUCGCUGCUCAC (SEQ ID NO: 14950)-[spacer]-[gRNA core]-[editing template]-[PBS]-CCAUCAGUUGACACCCUGAGG (SEQ ID NO: 14951), or GAGCAGCAUGGCGUCGCUGCUCAC (SEQ ID NO: 14950)-[spacer]-[gRNA core]-[editing template]-[PBS]-CCAUCAGUUGACACCCUGAGG-(U)n (SEQ ID NO: 14965), wherein n is an integer between 3 and 7. (VS ribozyme kissing loop)

[0537] In some embodiments, the PEgRNA comprises the sequence GCAGACCUAAGUGGUGACAUAUGGUCUG (SEQ ID No: 14952) at the 5′ end and/or the sequence CA UGCGA UUA GAAA UAA UCGCA UG (SEQ ID No: 14953) at the 3′ end. In some embodiments, the PEgRNA comprises the following structure (tetraloop and receptor): GCAGACCUAAGUGGUGACAUAUGGUCUG (SEQ ID NO: 14952)-[spacer]-[gRNA core]-[editing template]-[PBS]-CAUGCGAUUAGAAAUAAUCGCAUG (SEQ ID NO: 14953), or GCAGACCUAAGUGGUGACAUAUGGUCUG (SEQ ID NO: 14952)-[spacer]-[gRNA core]-[editing template]-[PBS]-CAUGCGAUUAGAAAUAAUCGCAUG-(U)n (SEQ ID NO: 14966), wherein n is an integer between 3 and 7. The tetraloop/tetraloop receptor structure is italicized.

[0538] In some embodiments, the PEgRNA comprises the sequence

(SEQ ID No: 14948)
GGCCGGCAUGGUCCCAGCCUCCUCGCUGGCGCCGGCUGGGCAACAUGCUU
CGGCAUGGCGAAUGGGAC
or
(SEQ ID NO: 14954)
UCUGCCAUCAAAGCUGCGACCGUGCUCAGUCUGGUGGGAGACGUCCCACC
GGCCGGCAUGGUCCCAGCCUCCUCGCUGGCGCCGGCUGGGCAACAUGCUU
CGGCAUGGCGAAUGGGAC.

[0539] In some embodiments, a PEgRNA comprises a gRNA core that comprises a modified direct repeat compared to the sequence of a naturally occurring CRISPR-Cas guide RNA scaffold, for example, a Cas9 gRNA scaffold. In some embodiments, the PEgRNA comprises a “flip and extension (F+E)” gRNA core, wherein one or more base pairs in a direct repeat is modified. In some embodiments, the PEgRNA comprises a first direct repeat (the first paring element or the lower stem), wherein a Uracil is changed to a Adenine (such that in the stem region, a U-A base pair is changed to a A-U base pair). In some embodiments, the PEgRNA comprises a first direct repeat wherein the fourth U-A base pair in the stem is changed to a A-U base pair. In some embodiments, the PEgRNA comprises a first direct repeat wherein one or more U-A base pair is changed to a G-C or C-G base pair. For example, in some embodiments, the PEgRNA comprises a first direct repeat comprising a modification to a GUUUU-AAAAC pairing element, wherein one or more of the U-A base pairs is changed to a A-U base pair, a G-C base pair, or a C-G base pair. In some embodiments, the PEgRNA comprises an extended first direct repeat.

[0540] In some embodiments, a PEgRNA comprises a gRNA core comprises the sequence G

(SEQ ID No: 14955)
GUUUUAGAGCUAUACGUAGCAAGUUAAAAUAAGGCUAGUCCGUUAUCAAC
UUUACGAAGUGGCACCGAGUCGGUGC
or
(SEQ ID NO: 14956)
GUUUUAGAGCUAUACGUAGCAAGUUAAAAUAAGGCUAGUCCGUUAUCAAC
UUUACGAAGUGGGACCGAGUCGGUCC.

[0541] In some embodiments, a PEgRNA comprises a gRNA core comprising the sequence

(SEQ ID NO: 14957)
GUUUUAGAGCUAGCUCAUGAAAAUGAGCUAGCAAGUUAAAAUAAGGCUAG
UCCGUUAUCAACUUGAAAAAGUGGGACCGAGUCGGUCC.

[0542] In some embodiments, a PEgRNA comprises a gRNA core comprising the sequence

(SEQ ID NO: 14906)
GUUUGAGAGCUAGAAAUAGCAAGUUUAAAUAAGGCUAGUCCGUUAUCAAC
UUGAAAAAGUGGGACCGAGUCGGUCC.

[0543] In some embodiments, a PEgRNA comprises a gRNA core comprising the sequence

(SEQ ID NO: 14959)
GUUUUAGAGCUAUGCUGGAAACAGCAUAGCAAGUUAAAAUAAGGCUAGUC
CGUUAUCAACUUGAAAAAGUGGCACCGAGUCGGUGC.

[0544] In some embodiments, a PEgRNA comprise a gRNA core comprising the sequence

(SEQ ID NO: 14907)
GUUUAAGAGCUAUGCUGGAAACAGCAUAGCAAGUUUAAAUAAGGCUAGUC
CGUUAUCAACUUGAAAAAGUGGCACCGAGUCGGUGC.

[0545] A PEgRNA and/or an ngRNA of this disclosure, in some embodiments, may include modified nucleotides, e.g., chemically modified DNA or RNA nucleobases, and may include one or more nucleobase analogs (e.g., modifications which might add functionality, such as temperature resilience). In some embodiments, PEgRNAs and/or ngRNAs as described herein may be chemically modified. The phrase “chemical modifications,” as used herein, can include modifications which introduce chemistries which differ from those seen in naturally occurring DNA or RNAs, for example, covalent modifications such as the introduction of modified nucleotides, (e.g., nucleotide analogs, or the inclusion of pendant groups which are not naturally found in DNA or RNA molecules).

[0546] In some embodiments, the PEgRNAs provided in the disclosure may further comprise nucleotides added to the 5′ of the PEgRNAs. In some embodiments, the PEgRNA further comprises 1, 2, or 3 additional nucleotides added to the 5′ end. The additional nucleotides can be guanine, cytosine, adenine, or uracil. In some embodiments, the additional nucleotide at the 5′ end of the PEgRNA is a guanine or cytosine. In some embodiments, the additional nucleotides can be chemically or biologically modified.

[0547] In some embodiments, the PEgRNAs provided in the disclosure may further comprise nucleotides to the 3′ of the PEgRNAs. In some embodiments, the PEgRNA further comprises 1, 2, or 3 additional nucleotides to the 3′ end. The additional nucleotides can be guanine, cytosine, adenine, or uracil. In some embodiments, the additional nucleotides at the 3′ end of the PEgRNA is a polynucleotide comprising at least 1 uracil. In some embodiments, the additional nucleotides can be chemically or biologically modified.

[0548] In some embodiments, a PEgRNA or ngRNA is produced by transcription from a template nucleotide, for example, a template plasmid. In some embodiments, a polynucleotide encoding the PEgRNA or ngRNA is appended with one or more additional nucleotides that improves PEgRNA or ngRNA function or expression, e.g., expression from a plasmid that encodes the PEgRNA or ngRNA. In some embodiments, a polynucleotide encoding a PEgRNA or ngRNA is appended with one or more additional nucleotides at the 5′ end or at the 3′ end. In some embodiments, the polynucleotide encoding the PEgRNA or ngRNA is appended with a guanine at the 5′ end, for example, if the first nucleotide at the 5′ end of the spacer is not a guanine. In some embodiments, a polynucleotide encoding the PEgRNA or ngRNA is appended with nucleotide sequence CACC at the 5′ end. In some embodiments, the polynucleotide encoding the PEgRNA or ngRNA is appended with an additional nucleotide adenine at the 3′ end, for example, if the last nucleotide at the 3′ end of the PBS is a Thymine. In some embodiments, the polynucleotide encoding the PEgRNA or ngRNA is appended with additional nucleotide sequence TTTTTT, TTTTTTT, TTTTT, or TTTT at the 3′ end. In some embodiments, the PEgRNA or ngRNA comprises the appended nucleotides from the transcription template. In some embodiments, the PEgRNA or ngRNA further comprises one or more nucleotides at the 5′ end or the 3′ end in addition to spacer, PBS, and RTT sequences, in some embodiments, the PEgRNA or ngRNA further comprises a guanine at the 5′ end, for example, when the first nucleotide at the 5′ end of the spacer is not a guanine. In some embodiments, the PEgRNA or ngRNA further comprises nucleotide sequence CACC at the 5′ end. In some embodiments, the PEgRNA or ngRNA further comprises an adenine at the 3′ end, for example, if the last nucleotide at the 3′ end of the PBS is a thymine. In some embodiments, the PEgRNA or ngRNA further comprises nucleotide sequence UUUUUUU, UUUUUU, UUUUU, or UUUU at the 3′ end.

[0549] In some embodiments, the PEgRNAs and/or ngRNAs provided in this disclosure may have undergone a chemical or biological modifications. Modifications may be made at any position within a PEgRNA or ngRNA, and may include modification to a nucleobase or to a phosphate backbone of the PEgRNA or ngRNA. In some embodiments, chemical modifications can be a structure guided modifications. In some embodiments, a chemical modification is at the 5′ end and/or the 3′ end of a PEgRNA. In some embodiments, a chemical modification is at the 5′ end and/or the 3′ end of a ngRNA. In some embodiments, a chemical modification may be within the spacer sequence, the extension arm, the editing template sequence, or the primer binding site of a PEgRNA. In some embodiments, a chemical modification may be within the spacer sequence or the gRNA core of a PEgRNA or a ngRNA. In some embodiments, a chemical modification may be within the 3′ most nucleotides of a PEgRNA or ngRNA. In some embodiments, a chemical modification may be within the 3′ most end of a PEgRNA or ngRNA comprises 1, 2, 3, 4, 5, 6, 7, 8, 9, 10 or more chemically modified nucleotides at the 3′ end. In some embodiments, a PEgRNA or ngRNA comprises 3 contiguous chemically modified nucleotides at the 3′ end. In some embodiments, a chemical modification may be within the 5′ most end of a PEgRNA or ngRNA. In some embodiments, a PEgRNA or ngRNA comprises 1, 2, 3, 4, 5, 6, 7, 8, 9, 10 or more chemically modified nucleotides at the 3′ end. In some embodiments, a PEgRNA or ngRNA comprises 1, 2, 3, 4, 5, 6, 7, 8, 9, 10 or more chemically modified nucleotides at the 5′ end. In some embodiments, a PEgRNA or ngRNA comprises 1, 2, 3, 4, or 5 or more chemically modified nucleotides at the 3′ end. In some embodiments, a PEgRNA or ngRNA comprises 1, 2, 3, 4, or 5 more chemically modified nucleotides at the 5′ end. In some embodiments, a PEgRNA or ngRNA comprises 1, 2, or 3 or more chemically modified nucleotides at the 3′ end. In some embodiments, a PEgRNA or ngRNA comprises 1, 2, or 3 more chemically modified nucleotides at the 5′ end. In some embodiments, a PEgRNA or ngRNA comprises 1, 2, 3, 4, 5, 6, 7, 8, 9, 10 or more contiguous chemically modified nucleotides at the 3′ end. In some embodiments, a PEgRNA or ngRNA comprises 1, 2, 3, 4, 5, 6, 7, 8, 9, 10 or more contiguous chemically modified nucleotides at the 5′ end. In some embodiments, a PEgRNA or ngRNA comprises 1, 2, 3, 4, or 5 contiguous chemically modified nucleotides at the 3′ end. In some embodiments, a PEgRNA or ngRNA comprises 1, 2, 3, 4, or 5 contiguous chemically modified nucleotides at the 5′ end. In some embodiments, a PEgRNA or ngRNA comprises 1, 2, or 3 contiguous chemically modified nucleotides at the 3′ end. In some embodiments, a PEgRNA or ngRNA comprises 1, 2, or 3 contiguous chemically modified nucleotides at the 5′ end. In some embodiments, a PEgRNA or ngRNA comprises 3 contiguous chemically modified nucleotides at the 3′ end. In some embodiments, a PEgRNA or ngRNA comprises 1, 2, 3, 4, 5, or more chemically modified nucleotides near the 3′ end. In some embodiments, a PEgRNA or ngRNA comprises 3 contiguous chemically modified nucleotides at the 3′ end. In some embodiments, a PEgRNA or ngRNA comprises 3 contiguous chemically modified nucleotides at the 5′ end. In some embodiments, a PEgRNA or ngRNA comprises 1, 2, 3, 4, 5, or more chemically modified nucleotides near the 3′ end. In some embodiments, a PEgRNA or ngRNA comprises 1, 2, 3, 4, 5, or more contiguous chemically modified nucleotides near the 3′ end. In some embodiments, a PEgRNA or ngRNA comprises 1, 2, 3, 4, 5, or more chemically modified nucleotides near the 3′ end, where the 3′ most nucleotide is not modified, and the 1, 2, 3, 4, 5, or more chemically modified nucleotides precede the 3′ most nucleotide in a 5′-to-3′ order. In some embodiments, a PEgRNA or ngRNA comprises 1, 2, 3, 4, 5, 6, 7, 8, 9, 10, 11, 12, 13, 14, 15, 16, 17, 18, 19, 20, 21, 22, 23, 24, 25, 26, 27, 28, 29, 30, 31, 32, 33, 34, 35 or more chemically modified nucleotides near the 3′ end, where the 3′ most nucleotide is not modified, and the 1, 2, 3, 4, 5, 6, 7, 8, 9, 10, 11, 12, 13, 14, 15, 16, 17, 18, 19, 20, 21, 22, 23, 24, 25, 26, 27, 28, 29, 30, 31, 32, 33, 34, 35 or more chemically modified nucleotides precede the 3′ most nucleotide in a 5′-to-3′ order.

[0550] In some embodiments, a PEgRNA or ngRNA comprises one or more chemical modified nucleotides in the gRNA core. The gRNA core of a PEgRNA may comprise one or more regions of a base paired lower stem, a base paired upper stem, where the lower stem and upper stem may be connected by a bulge comprising unpaired RNAs. The gRNA core may further comprise a nexus distal from the spacer sequence. In some embodiments, the gRNA core comprises one or more chemically modified nucleotides in the lower stem, upper stem, and/or the hairpin regions. In some embodiments, all of the nucleotides in the lower stem, upper stem, and/or the hairpin regions are chemically modified.

[0551] A chemical modification to a PEgRNA or ngRNA can comprise a 2′-O-thionocarbamate-protected nucleoside phosphoramidite, a 2′-O-methyl (M), a 2′-O-methyl 3′phosphorothioate (MS), or a 2′-O-methyl 3′thioPACE (MSP), or any combination thereof. In some embodiments, a chemically modified PEgRNA and/or ngRNA can comprise a ′-O-methyl (M) RNA, a 2′-O-methyl 3′phosphorothioate (MS) RNA, a 2′-O-methyl 3′thioPACE (MSP) RNA, a 2′-F RNA, a phosphorothioate bond modification, any other chemical modifications known in the art, or any combination thereof. A chemical modification may also include, for example, the incorporation of non-nucleotide linkages or modified nucleotides into the PEgRNA and/or ngRNA (e.g., modifications to one or both of the 3′ and 5′ ends of a guide RNA molecule). Such modifications can include the addition of bases to an RNA sequence, complexing the RNA with an agent (e.g., a protein or a complementary nucleic acid molecule), and inclusion of elements which change the structure of an RNA molecule (e.g., which form secondary structures).

### Prime Editing Compositions

[0552] Disclosed herein, in some embodiments, are compositions, systems, and methods using a prime editing composition. The term “prime editing composition” or “prime editing system” refers to compositions involved in the method of prime editing as described herein. A prime editing composition may include a prime editor, e.g., a prime editor fusion protein, and a PEgRNA. A prime editing composition may further comprise additional elements, such as second strand nicking ngRNAs. Components of a prime editing composition may be combined to form a complex for prime editing, or may be kept separately, e.g., for administration purposes. In some embodiments, a prime editing composition comprises a prime editor fusion protein complexed with a PEgRNA and optionally complexed with a ngRNA. In some embodiments, the prime editing composition comprises a prime editor comprising a DNA binding domain and a DNA polymerase domain associated with each other through a PEgRNA. For example, the prime editing composition may comprise a prime editor comprising a DNA binding domain and a DNA polymerase domain linked to each other by an RNA-protein recruitment aptamer RNA sequence, which is linked to a PEgRNA. In some embodiments, a prime editing composition comprises a PEgRNA and a polynucleotide, a polynucleotide construct, or a vector that encodes a prime editor fusion protein. In some embodiments, a prime editing composition comprises a PEgRNA, a ngRNA, and a polynucleotide, a polynucleotide construct, or a vector that encodes a prime editor fusion protein. In some embodiments, a prime editing composition comprises multiple polynucleotides, polynucleotide constructs, or vectors, each of which encodes one or more prime editing composition components. In some embodiments, the PEgRNA of a prime editing composition is associated with the DNA binding domain, e.g., a Cas9 nickase, of the prime editor. In some embodiments, the PEgRNA of a prime editing composition complexes with the DNA binding domain of a prime editor and directs the prime editor to the target DNA.

[0553] In some embodiments, a prime editing composition comprises one or more polynucleotides that encode prime editor components and/or PEgRNA or ngRNAs. In some embodiments, a prime editing composition comprises a polynucleotide encoding a fusion protein comprising a DNA binding domain and a DNA polymerase domain. In some embodiments, a prime editing composition comprises (i) a polynucleotide encoding a fusion protein comprising a DNA binding domain and a DNA polymerase domain, and (ii) a PEgRNA or a polynucleotide encoding the PEgRNA. In some embodiments, a prime editing composition comprises (i) a polynucleotide encoding a fusion protein comprising a DNA binding domain and a DNA polymerase domain, (ii) a PEgRNA or a polynucleotide encoding the PEgRNA, and (iii) an ngRNA or a polynucleotide encoding the ngRNA. In some embodiments, a prime editing composition comprises (i) a polynucleotide encoding a DNA binding domain of a prime editor, e.g., a Cas9 nickase, (ii) a polynucleotide encoding a DNA polymerase domain of a prime editor, e.g., a reverse transcriptase, and (iii) a PEgRNA or a polynucleotide encoding the PEgRNA. In some embodiments, a prime editing composition comprises (i) a polynucleotide encoding a DNA binding domain of a prime editor, e.g., a Cas9 nickase, (ii) a polynucleotide encoding a DNA polymerase domain of a prime editor, e.g., a reverse transcriptase, (iii) a PEgRNA or a polynucleotide encoding the PEgRNA, and (iv) an ngRNA or a polynucleotide encoding the ngRNA. In some embodiments, the polynucleotide encoding the DNA biding domain or the polynucleotide encoding the DNA polymerase domain further encodes an additional polypeptide domain, e.g., an RNA-protein recruitment domain, such as a MS2 coat protein domain. In some embodiments, a prime editing composition comprises (i) a polynucleotide encoding a N-terminal half of a prime editor fusion protein and an intein-N and (ii) a polynucleotide encoding a C-terminal half of a prime editor fusion protein and an intein-C. In some embodiments, a prime editing composition comprises (i) a polynucleotide encoding a N-terminal half of a prime editor fusion protein and an intein-N(ii) a polynucleotide encoding a C-terminal half of a prime editor fusion protein and an intein-C, (iii) a PEgRNA or a polynucleotide encoding the PEgRNA, and/or (iv) an ngRNA or a polynucleotide encoding the ngRNA. In some embodiments, a prime editing composition comprises (i) a polynucleotide encoding a N-terminal portion of a DNA binding domain and an intein-N, (ii) a polynucleotide encoding a C-terminal portion of the DNA binding domain, an intein-C, and a DNA polymerase domain. In some embodiments, the DNA binding domain is a Cas protein domain, e.g., a Cas9 nickase. In some embodiments, the prime editing composition comprises (i) a polynucleotide encoding a N-terminal portion of a DNA binding domain and an intein-N, (ii) a polynucleotide encoding a C-terminal portion of the DNA binding domain, an intein-C, and a DNA polymerase domain, (iii) a PEgRNA or a polynucleotide encoding the PEgRNA, and/or (iv) a ngRNA or a polynucleotide encoding the ngRNA.

[0554] In some embodiments, a prime editing system comprises one or more polynucleotides encoding one or more prime editor polypeptides, wherein activity of the prime editing system can be temporally regulated by controlling the timing in which the vectors are delivered. For example, in some embodiments, a polynucleotide encoding the prime editor and a polynucleotide encoding a PEgRNA can be delivered simultaneously. For example, in some embodiments, a polynucleotide encoding the prime editor and a polynucleotide encoding a PEgRNA can be delivered sequentially.

[0555] In some embodiments, a polynucleotide encoding a component of a prime editing system can further comprise an element that is capable of modifying the intracellular half-life of the polynucleotide and/or modulating translational control. In some embodiments, the polynucleotide is a RNA, for example, an mRNA. In some embodiments, the half-life of the polynucleotide, e.g., the RNA may be increased. In some embodiments, the half-life of the polynucleotide, e.g., the RNA may be decreased. In some embodiments, the element may be capable of increasing the stability of the polynucleotide, e.g., the RNA. In some embodiments, the element may be capable of decreasing the stability of the polynucleotide, e.g., the RNA. In some embodiments, the element may be within the 3′ UTR of the RNA. In some embodiments, the element may include a polyadenylation signal (PA). In some embodiments, the element may include a cap, e.g., an upstream mRNA or PEgRNA end. In some embodiments, the RNA may comprise no PA such that it is subject to quicker degradation in the cell after transcription.

[0556] In some embodiments, the element may include at least one AU-rich element (ARE). The AREs may be bound by ARE binding proteins (ARE-BPs) in a manner that is dependent upon tissue type, cell type, timing, cellular localization, and environment. In some embodiments the destabilizing element may promote RNA decay, affect RNA stability, or activate translation. In some embodiments, the ARE may comprise 50 to 150 nucleotides in length. In some embodiments, the ARE may comprise at least one copy of the sequence AUUUA. In some embodiments, at least one ARE may be added to the 3′ UTR of the RNA. In some embodiments, the element may be a Woodchuck Hepatitis Virus Posttranscriptional Regulatory Element (WPRE). In further embodiments, the element is a modified and/or truncated WPRE sequence that is capable of enhancing expression from the transcript. In some embodiments, the WPRE or equivalent may be added to the 3′ UTR of the RNA. In some embodiments, the element may be selected from other RNA sequence motifs that are enriched in either fast- or slow-decaying transcripts. In some embodiments, the polynucleotide, e.g., a vector, encoding the PE or the PEgRNA may be self-destroyed via cleavage of a target sequence present on the polynucleotide, e.g., a vector. The cleavage may prevent continued transcription of a PE or a PEgRNA.

[0557] Polynucleotides encoding prime editing composition components can be DNA, RNA, or any combination thereof. In some embodiments, a polynucleotide encoding a prime editing composition component is an expression construct. In some embodiments, a polynucleotide encoding a prime editing composition component is a vector. In some embodiments, the vector is a DNA vector. In some embodiments, the vector is a plasmid. In some embodiments, the vector is a virus vector, e.g., a retroviral vector, adenoviral vector, lentiviral vector, herpesvirus vector, or an adeno-associated virus vector (AAV).

[0558] In some embodiments, polynucleotides encoding polypeptide components of a prime editing composition are codon optimized by replacing at least one codon (e.g., about or more than about 1, 2, 3, 4, 5, 10, 15, 20, 25, 50, or more codons) of the native sequence with codons that are more frequently or most frequently used in the genes of that host cell while maintaining the native amino acid sequence. In some embodiments, a polynucleotide encoding a polypeptide component of a prime editing composition are operably linked to one or more expression regulatory elements, for example, a promoter, a 3′ UTR, a 5′ UTR, or any combination thereof. In some embodiments, a polynucleotide encoding a prime editing composition component is a messenger RNA (mRNA). In some embodiments, the mRNA comprises a Cap at the 5′ end and/or a poly A tail at the 3′ end.

[0559] In some embodiments, a PE3b*X ngRNA spacer will have 100% complementarity to an edited strand incorporating a polynucleotide encoded by a corresponding RTT*X wherein X is the same integer. In some embodiments X may be 1, 2, 3, 4, 5, 6, 7, 8, 9, 10, 11, 12, 13, 14, 15, 16, 17, 18, 19, 20, 21, 22, 21, 24, 25, 26, 27, 28, 29, 30, 31, 32, 33, 34, 35, 36, 37, 38, 39, 40, 41, 42, 43, 44, 45, 46, 47, 48, 49, 50, 51, 52, 53, 54, 55, 56, 57, 58, 59, 60, 61, 62, 63, 64, 65, 66, 67, 68, 69, 70, 71, 72, 73, 74, 75, 76, 77, 78, 79, 80, 81, 82, 83, 84, 84, 85, 86, 87, 88, 89, 90, 91, 92, 93, 93, 94, 95, 96, 97, 98, 99, 100, 101, 102, 103, 104, 105, 106, 107, 108, 109, 110, 111, 112, or 113.

### Pharmaceutical Compositions

[0560] Disclosed herein are pharmaceutical compositions comprising any of the prime editing composition components, for example, prime editors, fusion proteins, polynucleotides encoding prime editor polypeptides, PEgRNAs, ngRNAs, and/or prime editing complexes described herein.

[0561] The term “pharmaceutical composition”, as used herein, refers to a composition formulated for pharmaceutical use. In some embodiments, the pharmaceutical composition further comprises a pharmaceutically acceptable carrier. In some embodiments, the pharmaceutical composition comprises additional agents, e.g., for specific delivery, increasing half-life, or other therapeutic compounds.

[0562] In some embodiments, a pharmaceutically-acceptable carrier comprises any vehicle, such as a liquid or solid filler, diluent, excipient, manufacturing aid (e.g., lubricant, talc magnesium, calcium or zinc stearate, or steric acid), or solvent encapsulating material, involved in carrying or transporting the compound from one site (e.g., the delivery site) of the body, to another site (e.g., organ, tissue or portion of the body). A pharmaceutically acceptable carrier is “acceptable” in the sense of being compatible with the other ingredients of the formulation and not injurious to the tissue of the subject (e.g., physiologically compatible, sterile, physiologic pH, etc.)

[0563] Formulations of the pharmaceutical compositions described herein can be prepared by any method known or hereafter developed in the art of pharmacology. In general, such preparatory methods include the step of bringing the active ingredient(s) into association with an excipient and/or one or more other accessory ingredients, and then, if necessary and/or desirable, shaping and/or packaging the product into a desired single- or multi-dose unit. Pharmaceutical formulations can additionally comprise a pharmaceutically acceptable excipient, which, as used herein, includes any and all solvents, dispersion media, diluents, or other liquid vehicles, dispersion or suspension aids, surface active agents, isotonic agents, thickening or emulsifying agents, preservatives, solid binders, lubricants and the like, as suited to the particular dosage form desired.

### Methods of Editing

[0564] The methods and compositions disclosed herein can be used to edit a target gene of interest by prime editing.

[0565] In some embodiments, the prime editing method comprises contacting a target gene, e.g., an ATP7B gene, with a PEgRNA and a prime editor (PE) polypeptide described herein. In some embodiments, the target gene is double stranded, and comprises two strands of DNA complementary to each other. In some embodiments, the contacting with a PEgRNA and the contacting with a prime editor are performed sequentially. In some embodiments, the contacting with a prime editor is performed after the contacting with a PEgRNA. In some embodiments, the contacting with a PEgRNA is performed after the contacting with a prime editor. In some embodiments, the contacting with a PEgRNA, and the contacting with a prime editor are performed simultaneously. In some embodiments, the PEgRNA and the prime editor are associated in a complex prior to contacting a target gene.

[0566] In some embodiments, contacting the target gene with the prime editing composition results in binding of the PEgRNA to a target strand of the target gene, e.g., an ATP7B gene. In some embodiments, contacting the target gene with the prime editing composition results in binding of the PEgRNA to a search target sequence on the target strand of the target gene upon contacting with the PEgRNA. In some embodiments, contacting the target gene with the prime editing composition results in binding of a spacer sequence of the PEgRNA to a search target sequence with the search target sequence on the target strand of the target gene upon said contacting of the PEgRNA.

[0567] In some embodiments, contacting the target gene with the prime editing composition results in binding of the prime editor to the target gene, e.g., the target ATP7B gene, upon the contacting of the PE composition with the target gene. In some embodiments, the DNA binding domain of the PE associates with the PEgRNA. In some embodiments, the PE binds the target gene, e.g., an ATP7B gene, directed by the PEgRNA. Accordingly, in some embodiments, the contacting of the target gene result in binding of a DNA binding domain of a prime editor of the target ATP7B gene directed by the PEgRNA.

[0568] In some embodiments, contacting the target gene with the prime editing composition results in a nick in an edit strand of the target gene, e.g., an ATP7B gene by the prime editor upon contacting with the target gene, thereby generating a nicked on the edit strand of the target gene. In some embodiments, contacting the target gene with the prime editing composition results in a single-stranded DNA comprising a free 3′ end at the nick site of the edit strand of the target gene. In some embodiments, contacting the target gene with the prime editing composition results in a nick in the edit strand of the target gene by a DNA binding domain of the prime editor, thereby generating a single-stranded DNA comprising a free 3′ end at the nick site. In some embodiments, the DNA binding domain of the prime editor is a Cas domain. In some embodiments, the DNA binding domain of the prime editor is a Cas9. In some embodiments, the DNA binding domain of the prime editor is a Cas9 nickase.

[0569] In some embodiments, contacting the target gene with the prime editing composition results in hybridization of the PEgRNA with the 3′ end of the nicked single-stranded DNA, thereby priming DNA polymerization by a DNA polymerase domain of the prime editor. In some embodiments, the free 3′ end of the single-stranded DNA generated at the nick site hybridizes to a primer binding site sequence (PBS) of the contacted PEgRNA, thereby priming DNA polymerization. In some embodiments, the DNA polymerization is reverse transcription catalyzed by a reverse transcriptase domain of the prime editor. In some embodiments, the method comprises contacting the target gene with a DNA polymerase, e.g., a reverse transcriptase, as a part of a prime editor fusion protein or prime editing complex (in cis), or as a separate protein (in trans).

[0570] In some embodiments, contacting the target gene with the prime editing composition generates an edited single stranded DNA that is coded by the editing template of the PEgRNA by DNA polymerase mediated polymerization from the 3′ free end of the single-stranded DNA at the nick site. In some embodiments, the editing template of the PEgRNA comprises one or more intended nucleotide edits compared to endogenous sequence of the target gene, e.g., an ATP7B gene. In some embodiments, the intended nucleotide edits are incorporated in the target gene, by excision of the 5′ single stranded DNA of the edit strand of the target gene generated at the nick site and DNA repair. In some embodiments, the intended nucleotide edits are incorporated in the target gene by excision of the editing target sequence and DNA repair. In some embodiments, excision of the 5′ single stranded DNA of the edit strand generated at the nick site is by a flap endonuclease. In some embodiments, the flap nuclease is FEN1. In some embodiments, the method further comprises contacting the target gene with a flap endonuclease. In some embodiments, the flap endonuclease is provided as a part of a prime editor fusion protein. In some embodiments, the flap endonuclease is provided in trans.

[0571] In some embodiments, contacting the target gene with the prime editing composition generates a mismatched heteroduplex comprising the edit strand of the target gene that comprises the edited single stranded DNA, and the unedited target strand of the target gene. Without being bound by theory, the endogenous DNA repair and replication may resolve the mismatched edited DNA to incorporate the nucleotide change(s) to form the desired edited target gene.

[0572] In some embodiments, the method further comprises contacting the target gene, e.g., an ATP7B gene, with a nick guide (ngRNA) disclosed herein. In some embodiments, the ngRNA comprises a spacer that binds a second search target sequence on the edit strand of the target gene. In some embodiments, the contacted ngRNA directs the PE to introduce a nick in the target strand of the target gene. In some embodiments, the nick on the target strand (non-edit strand) results in endogenous DNA repair machinery to use the edit strand to repair the non-edit strand, thereby incorporating the intended nucleotide edit in both strand of the target gene and modifying the target gene. In some embodiments, the ngRNA comprises a spacer sequence that is complementary to, and may hybridize with, the second search target sequence on the edit strand only after the intended nucleotide edit(s) are incorporated in the edit strand of the target gene.

[0573] In some embodiments, the target gene is contacted by the ngRNA, the PEgRNA, and the PE simultaneously. In some embodiments, the ngRNA, the PEgRNA, and the PE form a complex when they contact the target gene. In some embodiments, the target gene is contacted with the ngRNA, the PEgRNA, and the prime editor sequentially. In some embodiments, the target gene is contacted with the ngRNA and/or the PEgRNA after contacting the target gene with the PE. In some embodiments, the target gene is contacted with the ngRNA and/or the PEgRNA before contacting the target gene with the prime editor.

[0574] In some embodiments, the target gene, e.g., an ATP7B gene, is in a cell. Accordingly, also provided herein are methods of modifying a cell.

[0575] In some embodiments, the prime editing method comprises introducing a PEgRNA, a prime editor, and/or a ngRNA into the cell that has the target gene. In some embodiments, the prime editing method comprises introducing into the cell that has the target gene with a prime editing composition comprising a PEgRNA, a prime editor polypeptide, and/or a ngRNA. In some embodiments, the PEgRNA, the prime editor polypeptide, and/or the ngRNA form a complex prior to the introduction into the cell. In some embodiments, the PEgRNA, the prime editor polypeptide, and/or the ngRNA form a complex after the introduction into the cell. The prime editors, PEgRNA and/or ngRNAs, and prime editing complexes may be introduced into the cell by any delivery approaches described herein or any delivery approach known in the art, including ribonucleoprotein (RNPs), lipid nanoparticles (LNPs), viral vectors, non-viral vectors. mRNA delivery, and physical techniques such as cell membrane disruption by a microfluidics device. The prime editors, PEgRNA and/or ngRNAs, and prime editing complexes may be introduced into the cell simultaneously or sequentially.

[0576] In some embodiments, the prime editing method comprises introducing into the cell a PEgRNA or a polynucleotide encoding the PEgRNA, a prime editor polynucleotide encoding a prime editor polypeptide, and optionally an ngRNA or a polynucleotide encoding the ngRNA. In some embodiments, the method comprises introducing the PEgRNA or the polynucleotide encoding the PEgRNA, the polynucleotide encoding the prime editor polypeptide, and/or the ngRNA or the polynucleotide encoding the ngRNA into the cell simultaneously. In some embodiments, the method comprises introducing the PEgRNA or the polynucleotide encoding the PEgRNA, the polynucleotide encoding the prime editor polypeptide, and/or the ngRNA or the polynucleotide encoding the ngRNA into the cell sequentially. In some embodiments, the method comprises introducing the polynucleotide encoding the prime editor polypeptide into the cell before introduction of the PEgRNA or the polynucleotide encoding the PEgRNA and/or the ngRNA or the polynucleotide encoding the ngRNA. In some embodiments, the polynucleotide encoding the prime editor polypeptide is introduced into and expressed in the cell before introduction of the PEgRNA or the polynucleotide encoding the PEgRNA and/or the ngRNA or the polynucleotide encoding the ngRNA into the cell. In some embodiments, the polynucleotide encoding the prime editor polypeptide is introduced into the cell after the PEgRNA or the polynucleotide encoding the PEgRNA and/or the ngRNA or the polynucleotide encoding the ngRNA are introduced into the cell. The polynucleotide encoding the prime editor polypeptide, the PEgRNA or the polynucleotide encoding the PEgRNA, and/or the ngRNA or the polynucleotide encoding the ngRNA, may be introduced into the cell by any delivery approaches described herein or any delivery approach known in the art, for example, by RNPs, LNPs, viral vectors, non-viral vectors, mRNA delivery, and physical. In some embodiments, the polynucleotide is a DNA polynucleotide. In some embodiments, the polynucleotide is a RNA polynucleotide, e.g., mRNA polynucleotide.

[0577] In some embodiments, the polynucleotide encoding the prime editor polypeptide, the polynucleotide encoding the PEgRNA, and/or the polynucleotide encoding the ngRNA integrate into the genome of the cell after being introduced into the cell. In some embodiments, the polynucleotide encoding the prime editor polypeptide, the polynucleotide encoding the PEgRNA, and/or the polynucleotide encoding the ngRNA are introduced into the cell for transient expression. Accordingly, also provided herein are cells modified by prime editing.

[0578] In some embodiments, the cell is a prokaryotic cell. In some embodiments, the cell is a eukaryotic cell. In some embodiments, the cell is a mammalian cell. In some embodiments, the cell is a non-human primate cell, bovine cell, porcine cell, rodent or mouse cell. In some embodiments, the cell is a human cell. In some embodiments, the cell is a primary cell. In some embodiments, the cell is a human primary cell. In some embodiments, the cell is a progenitor cell. In some embodiments, the cell is a human progenitor cell. In some embodiments, the cell is a hepatocyte. In some embodiments, the cell is a human hepatocyte. In some embodiments, the cell is a primary human hepatocyte derived from an induced human pluripotent stem cell (iPSC). In some embodiments, the cell is a neuron. In some embodiments, the cell is a neuron from basal ganglia. In some embodiments, the cell is a neuron from basal ganglia of a subject.

[0579] In some embodiments, the target gene edited by prime editing is in a chromosome of the cell. In some embodiments, the intended nucleotide edits incorporate in the chromosome of the cell and are inheritable by progeny cells. In some embodiments, the intended nucleotide edits introduced to the cell by the prime editing compositions and methods are such that the cell and progeny of the cell also include the intended nucleotide edits. In some embodiments, the cell is autologous, allogeneic, or xenogeneic to a subject. In some embodiments, the cell is from or derived from a subject. In some embodiments, the cell is from or derived from a human subject. In some embodiments, the cell is introduced back into the subject. e.g., a human subject, after incorporation of the intended nucleotide edits by prime editing.

[0580] In some embodiments, the method provided herein comprises introducing the prime editor polypeptide or the polynucleotide encoding the prime editor polypeptide, the PEgRNA or the polynucleotide encoding the PEgRNA, and/or the ngRNA or the polynucleotide encoding the ngRNA into a plurality or a population of cells that comprise the target gene. In some embodiments, the population of cells is of the same cell type. In some embodiments, the population of cells is of the same tissue or organ. In some embodiments, the population of cells is heterogeneous. In some embodiments, the population of cells is homogeneous. In some embodiments, the population of cells is from a single tissue or organ, and the cells are heterogeneous. In some embodiments, the introduction into the population of cells is ex vivo. In some embodiments, the introduction into the population of cells is in vivo, e.g., into a human subject.

[0581] In some embodiments, the target gene is in a genome of each cell of the population. In some embodiments, introduction of the prime editor polypeptide or the polynucleotide encoding the prime editor polypeptide, the PEgRNA or the polynucleotide encoding the PEgRNA, and/or the ngRNA or the polynucleotide encoding the ngRNA results in incorporation of one or more intended nucleotide edits in the target gene in at least one of the cells in the population of cells. In some embodiments, introduction of the prime editor polypeptide or the polynucleotide encoding the prime editor polypeptide, the PEgRNA or the polynucleotide encoding the PEgRNA, and/or the ngRNA or the polynucleotide encoding the ngRNA results in incorporation of the one or more intended nucleotide edits in the target gene in a plurality of the population of cells. In some embodiments, introduction of the prime editor polypeptide or the polynucleotide encoding the prime editor polypeptide, the PEgRNA or the polynucleotide encoding the PEgRNA, and/or the ngRNA or the polynucleotide encoding the ngRNA results in incorporation of the one or more intended nucleotide edits in the target gene in each cell of the population of cells. In some embodiments, introduction of the prime editor polypeptide or the polynucleotide encoding the prime editor polypeptide, the PEgRNA or the polynucleotide encoding the PEgRNA, and/or the ngRNA or the polynucleotide encoding the ngRNA results in incorporation of the one or more intended nucleotide edits in the target gene in sufficient number of cells such that the disease or disorder is treated, prevented or ameliorated.

[0582] In some embodiments, editing efficiency of the prime editing compositions and method described herein can be measured by calculating the percentage of edited target genes in a population of cells introduced with the prime editing composition. In some embodiments, the editing efficiency is determined after 1 hour, 2 hours. 6 hours. 12 hours, 24 hours, 36 hours. 48 hours, 3 days. 4 days, 5 days, 7 days. 10 days, or 14 days of exposing a target gene (e.g., a ATP7B gene within the genome of a cell) to a prime editing composition. In some embodiments, the population of cells introduced with the prime editing composition is ex vivo. In some embodiments, the population of cells introduced with the prime editing composition is in vitro. In some embodiments, the population of cells introduced with the prime editing composition is in vivo. In some embodiments, the prime editing methods disclosed herein have an editing efficiency of at least about 1%, at least about 5%, at least about 10%, at least about 20%, at least about 30%, at least about 40%, at least about 50%, at least about 600%, at least about 70%, at least about 80° %, at least about 90%, at least about 95%, or at least about 99% relative to a suitable control. In some embodiments, the prime editing methods disclosed herein have an editing efficiency of at least 25% relative to a suitable control. In some embodiments, the prime editing methods disclosed herein have an editing efficiency of at least 35% relative to a suitable control, prime editing method disclosed herein has an editing efficiency of at least 30% relative to a suitable control. In some embodiments, the prime editing methods disclosed herein have an editing efficiency of at least 45% relative to a suitable control. In some embodiments, the prime editing methods disclosed herein have an editing efficiency of at least 50% relative to a suitable control.

[0583] In some embodiments, the methods disclosed herein have an editing efficiency of at least about 1%, at least about 5%, at least about 7.5%, at least about 10%, at least about 15%, at least about 20%, at least about 30%, at least about 40%, at least about 50%, at least about 60%, at least about 70%, at least about 80%, at least about 90%, or at least about 95% of editing a primary cell relative to a suitable control.

[0584] In some embodiments, the methods disclosed herein have an editing efficiency of at least about 5%, at least about 7.5%, at least about 10%, at least about 15%, at least about 20%, at least about 30%, at least about 40%, at least about 50%, at least about 60%, at least about 70%, at least about 80%, at least about 90%, or at least about 95% of editing a hepatocyte relative to a corresponding control hepatocyte. In some embodiments, the hepatocyte is a human hepatocyte.

[0585] In some embodiments, the prime editing compositions provided herein are capable of incorporated one or more intended nucleotide edits without generating a significant proportion of indels. The term “indel(s)”, as used herein, refers to the insertion or deletion of a nucleotide base within a polynucleotide, for example, a target gene. Such insertions or deletions can lead to frame shift mutations within a coding region of a gene. Indel frequency of editing can be calculated by methods known in the art. In some embodiments, indel frequency can be calculated based on sequence alignment such as the CRISPResso 2 algorithm as described in Clement et al., Nat. Biotechnol. 37(3): 224-226 (2019), which is incorporated herein in its entirety. In some embodiments, the methods disclosed herein can have an indel frequency of less than 20%, less than 10%, less than 9%, less than 8%, less than 7%, less than 6%, less than 5%, less than 4%, less than 3%, less than 20, less than 1.5%, or less than 1%. In some embodiments, any number of indels is determined after at least 1 hour, at least 2 hours, at least 6 hours, at least 12 hours, at least 24 hours, at least 36 hours, at least 48 hours, at least 3 days, at least 4 days, at least 5 days, at least 7 days, at least 10 days, or at least 14 days of exposing a target gene (e.g., a ATP7B gene within the genome of a cell) to a prime editing composition.

[0586] In some embodiments, the prime editing compositions provided herein are capable of incorporated one or more intended nucleotide edits efficiently without generating a significant proportion of indels. In some embodiments, the prime editing methods disclosed herein have an editing efficiency of at least about 1% and an indel frequency of less than 1% in a target cell, e.g., a human primary cell or hepatocyte. In some embodiments, the prime editing methods disclosed herein have an editing efficiency of at least about 1% and an indel frequency of less than 0.5% in a target cell, e.g., a human primary cell or hepatocyte. In some embodiments, the prime editing methods disclosed herein have an editing efficiency of at least about 1% and an indel frequency of less than 0.1% in a target cell, e.g., a human primary cell or hepatocyte. In some embodiments, the prime editing methods disclosed herein have an editing efficiency of at least about 5% and an indel frequency of less than 1% in a target cell, e.g., a human primary cell or hepatocyte. In some embodiments, the prime editing methods disclosed herein have an editing efficiency of at least about 5% and an indel frequency of less than 0.5% in a target cell, e.g., a human primary cell or hepatocyte. In some embodiments, the prime editing methods disclosed herein have an editing efficiency of at least about 5% and an indel frequency of less than 0.1% in a target cell, e.g., a human primary cell or hepatocyte.

[0587] In some embodiments, the prime editing methods disclosed herein have an editing efficiency of at least about 7.5% and an indel frequency of less than 1% in a target cell, e.g., a human primary cell or hepatocyte. In some embodiments, the prime editing methods disclosed herein have an editing efficiency of at least about 7.5% and an indel frequency of less than 0.5% in a target cell, e.g., a human primary cell or hepatocyte. In some embodiments, the prime editing methods disclosed herein have an editing efficiency of at least about 7.5% and an indel frequency of less than 0.1% in a target cell, e.g., a human primary cell or hepatocyte.

[0588] In some embodiments, the prime editing methods disclosed herein have an editing efficiency of at least about 10% and an indel frequency of less than 1% in a target cell, e.g., a human primary cell or hepatocyte. In some embodiments, the prime editing methods disclosed herein have an editing efficiency of at least about 10% and an indel frequency of less than 0.5% in a target cell, e.g., a human primary cell or hepatocyte. In some embodiments, the prime editing methods disclosed herein have an editing efficiency of at least about 10% and an indel frequency of less than 0.1% in a target cell, e.g., a human primary cell or hepatocyte.

[0589] In some embodiments, the prime editing methods disclosed herein have an editing efficiency of at least about 15% and an indel frequency of less than 1% in a target cell, e.g., a human primary cell or hepatocyte. In some embodiments, the prime editing methods disclosed herein have an editing efficiency of at least about 15% and an indel frequency of less than 0.5% in a target cell, e.g., a human primary cell or hepatocyte. In some embodiments, the prime editing methods disclosed herein have an editing efficiency of at least about 15% and an indel frequency of less than 0.1% in a target cell, e.g., a human primary cell or hepatocyte.

[0590] In some embodiments, the prime editing methods disclosed herein have an editing efficiency of at least about 20% and an indel frequency of less than 1% in a target cell, e.g., a human primary cell or hepatocyte. In some embodiments, the prime editing methods disclosed herein have an editing efficiency of at least about 20% and an indel frequency of less than 0.5% in a target cell, e.g., a human primary cell or hepatocyte. In some embodiments, the prime editing methods disclosed herein have an editing efficiency of at least about 20% and an indel frequency of less than 0.1% in a target cell, e.g., a human primary cell or hepatocyte.

[0591] In some embodiments, the prime editing methods disclosed herein have an editing efficiency of at least about 30% and an indel frequency of less than 1% in a target cell, e.g., a human primary cell or hepatocyte. In some embodiments, the prime editing methods disclosed herein have an editing efficiency of at least about 30% and an indel frequency of less than 0.5% in a target cell, e.g., a human primary cell or hepatocyte. In some embodiments, the prime editing methods disclosed herein have an editing efficiency of at least about 30% and an indel frequency of less than 0.1% in a target cell, e.g., a human primary cell or hepatocyte.

[0592] In some embodiments, the prime editing methods disclosed herein have an editing efficiency of at least about 40% and an indel frequency of less than 1% in a target cell, e.g., a human primary cell or hepatocyte. In some embodiments, the prime editing methods disclosed herein have an editing efficiency of at least about 40% and an indel frequency of less than 0.5% in a target cell, e.g., a human primary cell or hepatocyte. In some embodiments, the prime editing methods disclosed herein have an editing efficiency of at least about 40% and an indel frequency of less than 0.1% in a target cell, e.g., a human primary cell or hepatocyte.

[0593] In some embodiments, the prime editing methods disclosed herein have an editing efficiency of at least about 50% and an indel frequency of less than 1% in a target cell, e.g., a human primary cell or hepatocyte. In some embodiments, the prime editing methods disclosed herein have an editing efficiency of at least about 50% and an indel frequency of less than 0.5% in a target cell, e.g., a human primary cell or hepatocyte. In some embodiments, the prime editing methods disclosed herein have an editing efficiency of at least about 50% and an indel frequency of less than 0.1% in a target cell, e.g., a human primary cell or hepatocyte.

[0594] In some embodiments, the prime editing methods disclosed herein have an editing efficiency of at least about 60% and an indel frequency of less than 1% in a target cell, e.g., a human primary cell or hepatocyte. In some embodiments, the prime editing methods disclosed herein have an editing efficiency of at least about 60% and an indel frequency of less than 0.5% in a target cell, e.g., a human primary cell or hepatocyte. In some embodiments, the prime editing methods disclosed herein have an editing efficiency of at least about 60% and an indel frequency of less than 0.1% in a target cell, e.g., a human primary cell or hepatocyte.

[0595] In some embodiments, the prime editing methods disclosed herein have an editing efficiency of at least about 70% and an indel frequency of less than 1% in a target cell, e.g., a human primary cell or hepatocyte. In some embodiments, the prime editing methods disclosed herein have an editing efficiency of at least about 70% and an indel frequency of less than 0.5% in a target cell, e.g., a human primary cell or hepatocyte. In some embodiments, the prime editing methods disclosed herein have an editing efficiency of at least about 70% and an indel frequency of less than 0.1% in a target cell, e.g., a human primary cell or hepatocyte.

[0596] In some embodiments, the prime editing methods disclosed herein have an editing efficiency of at least about 80% and an indel frequency of less than 1% in a target cell, e.g., a human primary cell or hepatocyte. In some embodiments, the prime editing methods disclosed herein have an editing efficiency of at least about 80% and an indel frequency of less than 0.5% in a target cell, e.g., a human primary cell or hepatocyte. In some embodiments, the prime editing methods disclosed herein have an editing efficiency of at least about 80% and an indel frequency of less than 0.1% in a target cell, e.g., a human primary cell or hepatocyte.

[0597] In some embodiments, the prime editing methods disclosed herein have an editing efficiency of at least about 90% and an indel frequency of less than 1% in a target cell, e.g., a human primary cell or hepatocyte. In some embodiments, the prime editing methods disclosed herein have an editing efficiency of at least about 90% and an indel frequency of less than 0.5% in a target cell, e.g., a human primary cell or hepatocyte. In some embodiments, the prime editing methods disclosed herein have an editing efficiency of at least about 90% and an indel frequency of less than 0.1% in a target cell, e.g., a human primary cell or hepatocyte.

[0598] In some embodiments, the prime editing methods disclosed herein have an editing efficiency of at least about 95% and an indel frequency of less than 1% in a target cell, e.g., a human primary cell or hepatocyte. In some embodiments, the prime editing methods disclosed herein have an editing efficiency of at least about 95% and an indel frequency of less than 0.5% in a target cell, e.g., a human primary cell or hepatocyte. In some embodiments, the prime editing methods disclosed herein have an editing efficiency of at least about 95% and an indel frequency of less than 0.1% in a target cell, e.g., a human primary cell or hepatocyte. In some embodiments, any number of indels is determined after at least 1 hour, at least 2 hours, at least 6 hours, at least 12 hours, at least 24 hours, at least 36 hours, at least 48 hours, at least 3 days, at least 4 days, at least 5 days, at least 7 days, at least 10 days, or at least 14 days of exposing a target gene (e.g., a ATP7B gene within the genome of a cell) to a prime editing composition. In some embodiments, the editing efficiency is determined after 1 hour, 2 hours, 6 hours, 12 hours, 24 hours, 36 hours, 48 hours, 3 days, 4 days, 5 days, 7 days, 10 days, or 14 days of exposing a target gene (e.g., a ATP7B gene within the genome of a cell) to a prime editing composition.

[0599] In some embodiments, the prime editing composition described herein result in less than 50%, less than 40%, less than 30%, less than 20%, less than 19%, less than 18%, less than 17%, less than 16%, less than 15%, less than 14%, less than 13%, less than 12%, less than 11%, less than 10%, less than 9%, less than 8%, less than 7%, less than 6%, less than 5%, less than 4%, less than 3%, less than 2%, less than 1%, less than 0.9%, less than 0.8%, less than 0.7%, less than 0.6%, less than 0.5%, less than 0.4%, less than 0.3%, less than 0.2%, less than 0.1%, less than 0.09%, less than 0.08%, less than 0.07%, less than 0.06%, less than 0.05%, less than 0.04%, less than 0.03%, less than 0.02%, or less than 0.01% off-target editing in a chromosome that includes the target gene. In some embodiments, off-target editing is determined after at least 1 hour, at least 2 hours, at least 6 hours, at least 12 hours, at least 24 hours, at least 36 hours, at least 48 hours, at least 3 days, at least 4 days, at least 5 days, at least 7 days, at least 10 days, or at least 14 days of exposing a target gene (e.g., a nucleic acid within the genome of a cell) to a prime editing composition.

[0600] In some embodiments, the prime editing compositions (e.g., PEgRNAs and prime editors as described herein) and prime editing methods disclosed herein can be used to edit a target ATP7B gene. In some embodiments, the target ATP7B gene comprises a mutation compared to a wild type ATP7B gene. In some embodiments, the mutation is associated with Wilson's disease. In some embodiments, the target ATP7B gene comprises an editing target sequence that contains the mutation associated with Wilson's disease. In some embodiments, the mutation is in a coding region of the target ATP7B gene. In some embodiments, the mutation is in an exon of the target ATP7B gene. In some embodiments, the mutation is in exon 1, exon 2, exon 3, exon 4, exon 5, exon 6, exon 7, exon 8, exon 9, exon 10, exon 11, exon 12, exon 13, exon 14, exon 15, exon 16, exon 17, exon 18, exon 19, exon 20, or exon 21 of the ATP7B gene as compared to a wild type ATP7B gene. In some embodiments, the mutation is exon 8, exon 13, exon 14, exon 15, or exon 17 of the A7P7B gene as compared to a wild type ATP7B gene. In some embodiments, the mutation is in exon 3 of the ATP7B gene as compared to a wild type ATP7B gene. In some embodiments, the mutation is located in exon 8 of the ATP7B gene as compared to a wild type ATP7B gene. In some embodiments, the mutation is not a c.1288dup duplication. In some embodiments, the mutation is in exon 14 of the target ATP7B gene. In some embodiments, the mutation is located between positions 51958233 and 51958433 of human chromosome 13 as set forth in human genome assembly consortium Human build 38 (GRCh38), GenBank accession GCA_000001405.15. In some embodiments, the mutation encodes an amino acid substitution R778L relative to a wild type ATP7B polypeptide set forth in SEQ ID NO: 14897. In some embodiments, the editing target sequence comprises a G>T mutation at position 51958333 in human chromosome 13 as set forth in human genome assembly consortium Human build 38 (GRCh38), GenBank accession GCA_000001405.15. In some embodiments, the prime editing method comprises contacting a target ATP7B gene with a prime editing composition comprising a prime editor, a PEgRNA, and/or a ngRNA. In some embodiments, contacting the target ATP7B gene with the prime editing composition results in incorporation of one or more intended nucleotide edits in the target ATP7B gene. In some embodiments, the incorporation is in a region of the target ATP7B gene that corresponds to an editing target sequence in the ATP7B gene. In some embodiments, the one or more intended nucleotide edits comprises a single nucleotide substitution, an insertion, a deletion, or any combination thereof, compared to the endogenous sequence of the target ATP7B gene. In some embodiments, incorporation of the one or more intended nucleotide edits results in replacement of one or more mutations with the corresponding sequence that encodes a wild type ATP7B polypeptide set forth in SEQ ID NO: 14897. In some embodiments, incorporation of the one or more intended nucleotide edits results in replacement of the one or more mutations with the corresponding sequence in a wild type ATP7B gene. In some embodiments, incorporation of the one more intended nucleotide edits results in correction of a mutation in the target ATP7B gene. In some embodiments, the target ATP7B gene comprises an editing template sequence that contains the mutation. In some embodiments, contacting the target ATP7B gene with the prime editing composition results in incorporation of one or more intended nucleotide edits in the target ATP7B gene, which corrects the mutation in the editing target sequence (or a double stranded region comprising the editing target sequence and the complementary sequence to the editing target sequence on a target strand) in the target ATP7B gene.

[0601] In some embodiments, incorporation of the one more intended nucleotide edits results in correction of a mutation in exon 8 of the target ATP7B gene as compared to a wild type ATP7B gene. In some embodiments, incorporation of the one more intended nucleotide edits results in correction of a mutation located between positions 51958233 and 51958433 of human chromosome 13 in the target ATP7B gene as set forth in human genome assembly consortium Human build 38 (GRCh38), GenBank accession GCA_000001405.15. In some embodiments, incorporation of the one more intended nucleotide edits results in an A>C nucleotide substitution at position 51944145 in human chromosome 13 in the target ATP7B gene as compared to the endogenous sequence of the target ATP7B gene, thereby correcting a G>T mutation at position 51958333 in human chromosome 13 in the target ATP7B gene as set forth in human genome assembly consortium Human build 38 (GRCh38), GenBank accession GCA_000001405.15. In some embodiments, incorporation of the one more intended nucleotide edits results in correction of an ATP7B gene sequence that encodes a R778L amino acid substitution and restores wild type expression and function of the ATP7B protein.

[0602] In some embodiments, the target ATP7B gene is in a target cell. Accordingly, in one aspect provided herein is a method of editing a target cell comprising a target ATP7B gene that encodes a polypeptide that comprises one or more mutations relative to a wild type ATP7B gene. In some embodiments, the methods of the present disclosure comprise introducing a prime editing composition comprising a PEgRNA, a prime editor polypeptide, and/or a ngRNA into the target cell that has the target ATP7B gene to edit the target ATP7B gene, thereby generating an edited cell. In some embodiments, the target cell is a mammalian cell. In some embodiments, the target cell is a human cell. In some embodiments, the target cell is a primary cell. In some embodiments, the target cell is a human primary cell. In some embodiments, the target cell is a progenitor cell. In some embodiments, the target cell is a human progenitor cell. In some embodiments, the target cell is a stem cell. In some embodiments, the target cell is a human stem cell. In some embodiments, the target cell is a hepatocyte. In some embodiments, the target cell is a human hepatocyte. In some embodiments, the target cell is a primary human hepatocyte derived from an induced human pluripotent stem cell (iPSC). In some embodiments, the cell is a neuron. In some embodiments, the cell is a neuron from basal ganglia. In some embodiments, the cell is a neuron from basal ganglia of a subject. In some embodiments, the cell is a neuron in the basal ganglia of a subject.

[0603] In some embodiments, components of a prime editing composition described herein are provided to a target cell in vitro. In some embodiments, components of a prime editing composition described herein are provided to a target cell ex vivo. In some embodiments, components of a prime editing composition described herein are provided to a target cell in vivo.

[0604] In some embodiments, incorporation of the one or more intended nucleotide edits in the target ATP7B gene that comprises one or more mutations restores wild type expression and function of the ATP7B protein encoded by the ATP7B gene. In some embodiments, the target A7P7B gene encodes a R778L amino acid substitution as compared to the wild type ATP7B protein prior to incorporation of the one or more intended nucleotide edits. In some embodiments, expression and/or function of the ATP7B protein may be measured when expressed in a target cell. In some embodiments, incorporation of the one or more intended nucleotide edits in the target ATP7B gene comprising one or more mutations lead to a fold change in a level of ATP7B gene expression, ATP7B protein expression, or a combination thereof. In some embodiments, a change in the level of ATP7B expression level can comprise a fold change of, e.g., 2-fold, 3-fold, 4-fold, 5-fold, 6-fold. 7-fold. 8-fold. 9-fold, 10-fold, 15-fold, 20-fold, 25-fold. 30-fold. 40-fold, 50-fold, 60-fold, 70-fold, 80-fold. 90-fold, 100-fold or greater as compared to expression in a suitable control cell not introduced with a prime editing composition described herein. In some embodiments, incorporation of the one or more intended nucleotide edits in the target ATP7B gene that comprises one or more mutations restores wild type expression of the ATP7B protein by at least 10%, 20%, 30%. 40%, 50%. 60/o, 70%, 80%. 90%, 95%, or 99% or more as compared to wild type expression of the ATP7B protein in a suitable control cell that comprises a wild type ATP7B gene.

[0605] In some embodiments, an ATP7B expression increase can be measured by a functional assay. In some embodiments, the functional assay can comprise a copper sensitivity assay, a cell viability assay, or a combination thereof. In some embodiments, protein expression can be measured using a protein assay. In some embodiments, protein expression can be measured using antibody testing. In some embodiments, an antibody can comprise anti-ATP7B. In some embodiments, protein expression can be measured using ELISA, mass spectrometry, Western blot, sodium dodecyl sulfate polyacrylamide gel electrophoresis (SDS-PAGE), high performance liquid chromatography (HPLC), electrophoresis, or any combination thereof. In some embodiments, a protein assay can comprise SDS-PAGE and densitometric analysis of a Coomassie Blue-stained gel. In some embodiments. ATP7B activity can be measured by measuring ATPase activity. In some embodiments, ATPase activity can be measured using an ATPase assay.

Methods of Treating Wilson's disease

[0606] In some embodiments, provided herein are methods for treatment of a subject diagnosed with a disease associated with or caused by one or more pathogenic mutations that can be corrected by prime editing. In some embodiments, provided herein are methods for treating Wilson's disease that comprise administering to a subject a therapeutically effective amount of a prime editing composition, or a pharmaceutical composition comprising a prime editing composition as described herein. In some embodiments, administration of the prime editing composition results in incorporation of one or more intended nucleotide edits in the target gene in the subject. In some embodiments, administration of the prime editing composition results in correction of one or more pathogenic mutations, e.g., point mutations, insertions, or deletions, associated with Wilson's disease in the subject. In some embodiments, the target gene comprise an editing target sequence that contains the pathogenic mutation. In some embodiments, administration of the prime editing composition results in incorporation of one or more intended nucleotide edits in the target gene that corrects the pathogenic mutation in the editing target sequence (or a double stranded region comprising the editing target sequence and the complementary sequence to the editing target sequence on a target strand) of the target gene in the subject.

[0607] In some embodiments, the method provided herein comprises administering to a subject an effective amount of a prime editing composition, for example, a PEgRNA, a prime editor, and/or a ngRNA. In some embodiments, the method comprises administering to the subject an effective amount of a prime editing composition described herein, for example, polynucleotides, vectors, or constructs that encode prime editing composition components, or RNPs. LNPs. and/or polypeptides comprising prime editing composition components. Prime editing compositions can be administered to target the ATP7B gene in a subject. e.g., a human subject, suffering from, having, susceptible to, or at risk for Wilsons' disease. Identifying a subject in need of such treatment can be in the judgment of a subject or a health care professional and can be subjective (e.g., opinion) or objective (e.g., measurable by a test or diagnostic method). In some embodiments, the subject has Wilson's disease.

[0608] In some embodiments, the subject has been diagnosed with Wilson's disease by sequencing of a ATP7B gene in the subject. In some embodiments, the subject comprises at least a copy of ATP7B gene that comprises one or more mutations compared to a wild type ATP7B gene. In some embodiments, the subject comprises at least a copy of ATP7B gene that comprises a mutation in a coding region of the ATP7B gene. In some embodiments, the subject comprises at least a copy of ATP7B gene that comprises a mutation in exon 1, exon 2, exon 3, exon 4, exon 5, exon 6, exon 7, exon 8, exon 9, exon 10, exon 11, exon 12, exon 13, exon 14, exon 15, exon 16, exon 17, exon 18, exon 19, exon 20, or exon 21, as compared to a wild type ATP7B gene. In some embodiments, the subject comprises at least a copy of ATP7B gene that comprises a mutation in exon 8, exon 13, exon 14, exon 15, or exon 17 as compared to a wild type ATP7B gene. In some embodiments, the subject comprises at least a copy of ATP7B gene that comprises a mutation in exon 8 of the ATP7B gene as compared to a wild type ATP7B gene. In some embodiments, the subject comprises at least a copy of ATP7B gene that comprises a mutation in exon 3 as compared to a wild type ATP7B gene. In some embodiments, the mutation is not a c.1288dup duplication. In some embodiments, the subject comprises at least a copy of ATP7B gene that encodes a polypeptide that comprises an amino acid substitution R778L relative to a wild type ATP7B polypeptide set forth in SEQ ID NO: 14897.

[0609] In some embodiments, a population of patients each having one or more mutations in the target ATP7B gene may be treated with a prime editing composition (e.g., a PEgRNA, a prime editor, and optionally an ngRNA as described herein) disclosed herein. In some embodiments, a population of patients with different mutations in the target ATP7B gene can be treated with the same prime editing composition comprising a single PEgRNA, a prime editor, and optionally an ngRNA. In some embodiments, a single prime editing composition comprising a single PEgRNA and a prime editor can be used to correct one or more, or two or more, mutations in the target ATP7B gene in a populations of patients, wherein one or more patients in the population have different mutations from one another. In some embodiments, the prime editing composition comprising a single pair of PEgRNA, a prime editor, and optionally an ngRNA can be used to correct 2, 3, 4, 5, 6, 7, 8, 9, 10, 15, 20, 25 or more mutations in the target ATP7B gene in a population of patients, wherein one or more patients in the population have different mutations from one another. In some embodiments, the PEgRNA comprises an editing template comprising a wild type sequence of the ATP7B gene.

[0610] In some embodiments, a patient with multiple mutations in the target ATP7B gene can be treated with a prime editing composition (e.g., a PEgRNAs, a prime editor, and optionally an ngRNA as described herein). For example, in some embodiments, a subject may comprise two copies of the ATP7B gene, each comprising one or more different mutations. In some embodiments, a patient with one or more different mutations in the target ATP7B gene can be treated with a single prime editing composition comprising a PEgRNAs, a prime editor, and optionally an ngRNA.

[0611] In some embodiments, the method comprises directly administering prime editing compositions provided herein to a subject. The prime editing compositions described herein can be delivered with in any form as described herein, e.g., as LNPs, RNPs, polynucleotide vectors such as viral vectors, or mRNAs. The prime editing compositions can be formulated with any pharmaceutically acceptable carrier described herein or known in the art for administering directly to a subject. Components of a prime editing composition or a pharmaceutical composition thereof may be administered to the subject simultaneously or sequentially. For example, in some embodiments, the method comprises administering a prime editing composition, or pharmaceutical composition thereof, comprising a complex that comprises a prime editor fusion protein and a PEgRNA and/or a ngRNA, to a subject. In some embodiments, the method comprises administering a polynucleotide or vector encoding a prime editor to a subject simultaneously with a PEgRNA and/or a ngRNA. In some embodiments, the method comprises administering a polynucleotide or vector encoding a prime editor to a subject before administration with a PEgRNA and/or a ngRNA.

[0612] Suitable routes of administrating the prime editing compositions to a subject include, without limitation: topical, subcutaneous, transdermal, intradermal, intralesional, intraarticular, intraperitoneal, intravesical, transmucosal, gingival, intradental, intracochlear, transtympanic, intraorgan, epidural, intrathecal, intramuscular, intravenous, intravascular, intraosseus, periocular, intratumoral, intracerebral, and intracerebroventricular administration. In some embodiments, the compositions described are administered intraperitoneally, intravenously, or by direct injection or direct infusion. In some embodiments, the compositions described are administered by direct injection or infusion into the liver of a subject. In some embodiments, the compositions described herein are administered to a subject by injection, by means of a catheter, by means of a suppository, or by means of an implant.

[0613] In some embodiments, the method comprises administering cells edited with a prime editing composition described herein to a subject. In some embodiments, the cells are allogeneic. In some embodiments, allogeneic cells are or have been contacted ex vivo with a prime editing composition or pharmaceutical composition thereof and are introduced into a human subject in need thereof. In some embodiments, the cells are autologous to the subject. In some embodiments, cells are removed from a subject and contacted ex vivo with a prime editing composition or pharmaceutical composition thereof and are re-introduced into the subject.

[0614] In some embodiments, cells are contacted ex vivo with one or more components of a prime editing composition. In some embodiments, the ex vivo-contacted cells are introduced into the subject, and the subject is administered in vivo with one or more components of a prime editing composition. For example, in some embodiments, cells are contacted ex vivo with a prime editor and introduced into a subject. In some embodiments, the subject is then administered with a PEgRNA and/or a ngRNA, or a polynucleotide encoding the PEgRNA and/or the ngRNA.

[0615] In some embodiments, cells contacted with the prime editing composition are determined for incorporation of the one or more intended nucleotide edits in the genome before re-introduction into the subject. In some embodiments, the cells are enriched for incorporation of the one or more intended nucleotide edits in the genome before re-introduction into the subject. In some embodiments, the edited cells are primary cells. In some embodiments, the edited cells are progenitor cells. In some embodiments, the edited cells are stem cells. In some embodiments, the edited cells are hepatocytes. In some embodiments, the edited cells are primary human cells. In some embodiments, the edited cells are human progenitor cells. In some embodiments, the edited cells are human stem cells. In some embodiments, the edited cells are human hepatocytes. In some embodiments, the cell is a neuron. In some embodiments, the cell is a neuron from basal ganglia. In some embodiments, the cell is a neuron from basal ganglia of a subject. In some embodiments, the cell is a neuron in the basal ganglia of a subject. The prime editing composition or components thereof may be introduced into a cell by any delivery approaches as described herein, including LNP administration, RNP administration, electroporation, nucleofection, transfection, viral transduction, microinjection, cell membrane disruption and diffusion, or any other approach known in the art.

[0616] The cells edited with prime editing can be introduced into the subject by any route known in the art. In some embodiments, the edited cells are administered to a subject by direct infusion. In some embodiments, the edited cells are administered to a subject by intravenous infusion. In some embodiments, the edited cells are administered to a subject as implants.

[0617] The pharmaceutical compositions, prime editing compositions, and cells, as described herein, can be administered in effective amounts. In some embodiments, the effective amount depends upon the mode of administration. In some embodiments, the effective amount depends upon the stage of the condition, the age and physical condition of the subject, the nature of concurrent therapy, if any, and like factors well-known to the medical practitioner.

[0618] The specific dose administered can be a uniform dose for each subject. Alternatively, a subject's dose can be tailored to the approximate body weight of the subject. Other factors in determining the appropriate dosage can include the disease or condition to be treated or prevented, the severity of the disease, the route of administration, and the age, sex and medical condition of the patient.

[0619] In embodiments wherein components of a prime editing composition are administered sequentially, the time between sequential administration can be at least 1 hour, at least 2 hours, at least 6 hours, at least 12 hours, at least 24 hours, at least 36 hours, at least 48 hours, at least 3 days, at least 4 days, at least 5 days, at least 7 days, at least 10 days, or at least 14 days.

[0620] In some embodiments, a method of monitoring treatment progress is provided. In some embodiments, the method includes the step of determining a level of diagnostic marker, for example, correction of a mutation in ATP7B gene, or diagnostic measurement associated with Wilson's disease, (e.g., copper sensitivity screen or assay) in a subject suffering from Wilson's disease symptoms and has been administered an effective amount of a prime editing composition described herein. The level of the diagnostic marker determined in the method can be compared to known levels of the marker in either healthy normal controls or in other afflicted subjects to establish the subject's disease status.

### Delivery

[0621] Prime editing compositions described herein can be delivered to a cellular environment with any approach known in the art. Components of a prime editing composition can be delivered to a cell by the same mode or different modes. For example, in some embodiments, a prime editor can be delivered as a polypeptide or a polynucleotide (DNA or RNA) encoding the polypeptide. In some embodiments, a PEgRNA can be delivered directly as an RNA or as a DNA encoding the PEgRNA.

[0622] In some embodiments, a prime editing composition component is encoded by a polynucleotide, a vector, or a construct. In some embodiments, a prime editor polypeptide, a PEgRNA and/or a ngRNA is encoded by a polynucleotide. In some embodiments, the polynucleotide encodes a prime editor fusion protein comprising a DNA binding domain and a DNA polymerase domain. In some embodiments, the polynucleotide encodes a DNA polymerase domain of a prime editor. In some embodiments, the polynucleotide encodes a DNA polymerase domain of a prime editor. In some embodiments, the polynucleotide encodes a portion of a prime editor protein, for example, a N-terminal portion of a prime editor fusion protein connected to an intein-N. In some embodiments, the polynucleotide encodes a portion of a prime editor protein, for example, a C-terminal portion of a prime editor fusion protein connected to an intein-C. In some embodiments, the polynucleotide encodes a PEgRNA and/or a ngRNA. In some embodiments, the polypeptide encodes two or more components of a prime editing composition, for example, a prime editor fusion protein and a PEgRNA.

[0623] In some embodiments, the polynucleotide encoding one or more prime editing composition components is delivered to a target cell is integrated into the genome of the cell for long-term expression, for example, by a retroviral vector. In some embodiments, the polynucleotide delivered to a target cell is expressed transiently. For example, the polynucleotide may be delivered in the form of a mRNA, or a non-integrating vector (non-integrating virus, plasmids, minicircle DNAs) for episomal expression.

[0624] In some embodiments, a polynucleotide encoding one or more prime editing system components can be operably linked to a regulatory element. e.g., a transcriptional control element, such as a promoter. In some embodiments, the polynucleotide is operably linked to multiple control elements. Depending on the expression system utilized, any of a number of suitable transcription and translation control elements, including constitutive and inducible promoters, transcription enhancer elements, transcription terminators, etc. may be used in the expression vector (e.g., U6 promoter, H1 promoter).

[0625] In some embodiments, the polynucleotide encoding one or more prime editing composition components is a part of, or is encoded by, a vector. In some embodiments, the vector is a viral vector. In some embodiments, the vector is a non-viral vector.

[0626] Non-viral vector delivery systems can include DNA plasmids, RNA (e.g., a transcript of a vector described herein), naked nucleic acid, and nucleic acid complexed with a delivery vehicle, such as a liposome. In some embodiments, the polynucleotide is provided as an RNA. e.g., a mRNA or a transcript. Any RNA of the prime editing systems, for example a guide RNA or a base editor-encoding mRNA, can be delivered in the form of RNA. In some embodiments, one or more components of the prime editing system that are RNAs is produced by direct chemical synthesis or may be transcribed in vitro from a DNA. In some embodiments, a mRNA that encodes a prime editor polypeptide is generated using in vitro transcription. Guide polynucleotides (e.g., PEgRNA or ngRNA) can also be transcribed using in vitro transcription from a cassette containing a T7 promoter, followed by the sequence “GG”, and guide polynucleotide sequence. In some embodiments, the prime editor encoding mRNA, PEgRNA, and/or ngRNA are synthesized in vitro using an RNA polymerase enzyme (e.g., T7 polymerase, T3 polymerase, SP6 polymerase, etc.). Once synthesized, the RNA can directly contact a target ATP7B gene or can be introduced into a cell using any suitable technique for introducing nucleic acids into cells (e.g., microinjection, electroporation, transfection). In some embodiments, the prime editor-coding sequences, the PEgRNAs, and/or the ngRNAs are modified to include one or more modified nucleoside e.g., using pseudo-U or 5-Methyl-C.

[0627] Methods of non-viral delivery of nucleic acids can include lipofection, nucleofection, microinjection, biolistics, virosomes, liposomes, immunoliposomes, polycation or lipid:nucleic acid conjugates, naked DNA, artificial virions, cell membrane disruption by a microfluidics device, and agent-enhanced uptake of DNA. Cationic and neutral lipids that are suitable for efficient receptor-recognition lipofection of polynucleotides can be used. Delivery can be to cells (e.g., in vitro or ex vivo administration) or target tissues (e.g., in vivo administration). The preparation of lipid:nucleic acid complexes, including targeted liposomes such as immunolipid complexes, can be used.

[0628] Viral vector delivery systems can include DNA and RNA viruses, which can have either episomal or integrated genomes after delivery to the cell. RNA or DNA viral based systems can be used to target specific cells and trafficking the viral payload to an organelle of the cell. Viral vectors can be administered directly (in vivo) or they can be used to treat cells in vitro, and the modified cells can optionally be administered (ex vivo).

[0629] In some embodiments, the viral vector is a retroviral, lentiviral, adenoviral, adeno-associated viral or herpes simplex viral vector. Retroviral vectors can include those based upon murine leukemia virus (MuLV), gibbon ape leukemia virus (GaLV), Simian Immunodeficiency virus (SIV), human immunodeficiency virus (HIV), and combinations thereof. In some embodiments, the retroviral vector is a lentiviral vector. In some embodiments, the retroviral vector is a gamma retroviral vector. In some embodiments, the viral vector is an adenoviral vector. In some embodiments, the viral vector is an adeno-associated virus (“AAV”) vector.

[0630] In some embodiments, polynucleotides encoding one or more prime editing composition components are packaged in a virus particle. Packaging cells can be used to form virus particles that can infect a target cell. Such cells can include 293 cells, (e.g., for packaging adenovirus), and .psi.2 cells or PA317 cells (e.g., for packaging retrovirus). Viral vectors can be generated by producing a cell line that packages a nucleic acid vector into a viral particle. The vectors can contain the minimal viral sequences required for packaging and subsequent integration into a host. The vectors can contain other viral sequences being replaced by an expression cassette for the polynucleotide(s) to be expressed. The missing viral functions can be supplied in trans by the packaging cell line. For example, AAV vectors can comprise ITR sequences from the AAV genome which are required for packaging and integration into the host genome. In some embodiment, the polynucleotides are a DNA polynucleotide. In some embodiment, the polynucleotides are an RNA polynucleotide; e.g., an mRNA polynucleotide.

[0631] In some embodiments, the AAV vector is selected for tropism to a particular cell, tissue, organism. In some embodiments, the AAV vector is pseudotyped, e.g., AAV5/8. In some embodiments, polynucleotides encoding one or more prime editing composition components are packaged in a first AAV and a second AAV. In some embodiments, the polynucleotides encoding one or more prime editing composition components are packaged in a first rAAV and a second rAAV.

[0632] In some embodiments, dual AAV vectors are generated by splitting a large transgene expression cassette in two separate halves (5′ and 3′ ends that encode N-terminal portion and C-terminal portion of, e.g., a prime editor polypeptide), where each half of the cassette is no more than 5 kb in length, optionally no more than 4.7 kb in length, and is packaged in a single AAV vector. In some embodiments, the full-length transgene expression cassette is reassembled upon co-infection of the same cell by both dual AAV vectors. In some embodiments, a portion or fragment of a prime editor polypeptide. e.g., a Cas9 nickase, is fused to an intein. The portion or fragment of the polypeptide can be fused to the N-terminus or the C-terminus of the intein. In some embodiments, a N-terminal portion of the polypeptide is fused to an intein-N, and a C-terminal portion of the polypeptide is separately fused to an intein-C. In some embodiments, a portion or fragment of a prime editor fusion protein is fused to an intein and fused to an AAV capsid protein. In some embodiments, intein-N may be fused to the N-terminal portion of a first domain described herein, and intein-C may be fused to the C-terminal portion of a second domain described herein for the joining of the N-terminal portion to the C-terminal portion, thereby joining the first and second domains. In some embodiments, the first and second domains are each independently chosen from a DNA binding domain or a DNA polymerase domain. The intein, nuclease and capsid protein can be fused together in any arrangement (e.g., nuclease-intein-capsid, intein-nuclease-capsid, capsid-intein-nuclease, etc.). In some embodiments, a polynucleotide encoding a prime editor fusion protein is split in two separate halves, each encoding a portion of the prime editor fusion protein and separately fused to an intein. In some embodiments, each of the two halves of the polynucleotide is packaged in an individual AAV vector of a dual AAV vector system. In some embodiments, each of the two halves of the polynucleotide is no more than 5 kb in length, optionally no more than 4.7 kb in length. In some embodiments, the full-length prime editor fusion protein is reassembled upon co-infection of the same cell by both dual AA V vectors, expression of both halves of the prime editor fusion protein, and self-excision of the inteins. In some embodiments, the in vivo use of dual AAV vectors results in the expression of full-length full-length prime editor fusion proteins. In some embodiments, the use of the dual AAV vector platform allows viable delivery of transgenes of greater than about 4.5, 4.6, 4.7, 4.8, 4.9, or 5.0 kb in size.

[0633] In some embodiments, an intein is inserted at a splice site within a Cas protein. In some embodiments, insertion of an intein disrupts a Cas activity. As used herein, “intein” refers to a self-splicing protein intron (e.g., peptide), e.g., which ligates flanking N-terminal and C-terminal exteins (e.g., fragments to be joined). In some embodiments, an intein may comprise a polypeptide that is able to excise itself and join exteins with a peptide bond (e.g., protein splicing). In some embodiments, an intein of a precursor gene comes from two genes (e.g., split intein). In some embodiments, an intein may be a synthetic intein. Non-limiting examples of intein pairs that may be used in accordance with the present disclosure include: dnaE-n and dnaE-c, a 4-hydroxytamoxifen (4-HT)-responsive intein, an iCas molecule, a Ssp DnaX intein, Ter DnaE3 intein, Ter ThyX intein, Rma DnaB intein, Cfa DnaE intein, Ssp GyrB intein, and Rma DnaB intein. In some embodiments, intein fragments may be fused to the N terminal and C-terminal portion of a split Cas protein respectively for joining the fragments of split Cas9.

[0634] In some embodiments, the split Cas9 system may be used in general to bypass the packing limit of the viral delivery vehicles. In some embodiments, a split Cas9 may be a Type II CRISPR system Cas9. In some embodiments, a first nucleic acid encodes a first portion of the Cas9 protein having a first split-intein and wherein the second nucleic acid encodes a second portion of the Cas9 protein having a second split-intein complementary to the first split-intein and wherein the first portion of the Cas9 protein and the second portion of the Cas9 protein are joined together to form the Cas9 protein. In some embodiments, the first portion of the Cas9 protein is the N-terminal fragment of the Cas9 protein and the second portion of the Cas9 protein is the C-terminal fragment of the Cas9 protein. In some embodiments, a split site may be selected which are surface exposed due to the sterical need for protein splicing.

[0635] In some embodiments, a Can protein may be split into two fragments at any C, T, A, or S. In some embodiments, a Cas9 may be intein split at residues 203-204, 280-292, 292-364, 311-325, 417-438, 445-483, 468-469, 481-502, 513-520, 522-530, 565-637, 696-707, 713-714, 795-804, 803-810, 878-887, and 1153-1154. In some embodiments, protein is divided into two fragments at SpCas9 T310, T313, A456, S469, or C574. In some embodiments, split Cas9 fragments across different split pairs yield combinations that provided the complete polypeptide sequence activate gene expression even when fragments are partially redundant. In some embodiments, a functional Cas9 protein may be reconstituted from two inactive split-Cas9 peptides in the presence of gRNA by using a split-intein protein splicing strategy. In some embodiment, the split Cas9 fragments are fused to either a N-terminal intein fragment or a C-terminal intein fragment, which can associate with each other and catalytically splice the two split Cas9 fragments into a functional reconstituted Cas9 protein. In some embodiments, a split-Cas9 can be packaged into self-complementary AAV. In some embodiments, a split-Cas9 comprises a 2.5 kb and a 2.2 kb fragment of S. pyogenes Cas9 coding sequences

[0636] In some embodiments, a split-Cas9 architecture reduces the length and/or size of the coding sequences of a viral vector, e.g., AAV.

[0637] A target cell can be transiently or non-transiently transfected with one or more vectors described herein. A cell can be transfected as it naturally occurs in a subject. A cell can be taken or derived from a subject and transfected. A cell can be derived from cells taken from a subject, such as a cell line. In some embodiments, a cell transfected with one or more vectors described herein can be used to establish a new cell line comprising one or more vector-derived sequences. In some embodiments, a cell transiently transfected with the compositions of the disclosure (such as by transient transfection of one or more vectors, or transfection with RNA), and modified through the activity of a prime editor, can be used to establish a new cell line comprising cells containing the modification but lacking any other exogenous sequence. Any suitable vector compatible with the host cell can be used with the methods of the disclosure. Non-limiting examples of vectors include pXT1, pSG5, pSVK3, pBPV, pMSG, and pSVLSV40.

[0638] In some embodiments, a prime editor protein can be provided to cells as a polypeptide. In some embodiments, the prime editor protein is fused to a polypeptide domain that increases solubility of the protein. In some embodiments, the prime editor protein is formulated to improve solubility of the protein.

[0639] In some embodiment, a prime editor polypeptide is fused to a polypeptide permeant domain to promote uptake by the cell. In some embodiments, the permeant domain is a including peptide, a peptidomimetic, or a non-peptide carrier. For example, a permeant peptide may be derived from the third alpha helix of Drosophila melanogaster transcription factor Antennapaedia, referred to as penetratin, which comprises the amino acid sequence RQIKIWFQNRRMKWKK (SEQ ID NO: 14967). As another example, the permeant peptide can comprise the HIV-1 tat basic region amino acid sequence, which may include, for example, amino acids 49-57 of naturally-occurring tat protein. Other permeant domains can include poly-arginine motifs, for example, the region of amino acids 34-56 of HIV-1 rev protein, nona-arginine (SEQ ID NO: 14968), and octa-arginine (SEQ ID NO: 14969). The nona-arginine (R9) sequence (SEQ ID NO: 14968) can be used. The site at which the fusion can be made may be selected in order to optimize the biological activity, secretion or binding characteristics of the polypeptide.

[0640] In some embodiments, a prime editor polypeptide is produced in vitro or by host cells, and it may be further processed by unfolding, e.g., heat denaturation. DTT reduction, etc. and may be further refolded. In some embodiments, a prime editor polypeptide is prepared by in vitro synthesis. Various commercial synthetic apparatuses can be used. By using synthesizers, naturally occurring amino acids can be substituted with unnatural amino acids. In some embodiments, a prime editor polypeptide is isolated and purified in accordance with recombinant synthesis methods, for example, by expression in a host cell and the lysate purified using HPLC, exclusion chromatography, gel electrophoresis, affinity chromatography, or other purification technique.

[0641] In some embodiments, a prime editing composition, for example, prime editor polypeptide components and PEgRNA/ngRNA are introduced to a target cell by nanoparticles. In some embodiments, the prime editor polypeptide components and the PEgRNA and/or ngRNA form a complex in the nanoparticle. Any suitable nanoparticle design can be used to deliver genome editing system components or nucleic acids encoding such components. In some embodiments, the nanoparticle is inorganic. In some embodiments, the nanoparticle is organic. In some embodiments, a prime editing composition is delivered to a target cell, e.g., a hepatocyte, in an organic nanoparticle, e.g., a lipid nanoparticle (LNP) or polymer nanoparticle.

[0642] In some embodiments, LNPs are formulated from cationic, anionic, neutral lipids, or combinations thereof. In some embodiments, neutral lipids, such as the fusogenic phospholipid DOPE or the membrane component cholesterol, are included to enhance transfection activity and nanoparticle stability. In some embodiments, LNPs are formulated with hydrophobic lipids, hydrophilic lipids, or combinations thereof. Lipids may be formulated in a wide range of molar ratios to produce an LNP. Any lipid or combination of lipids that are known in the art can be used to produce an LNP. Exemplary lipids used to produce LNPs are provided in Table 92 below.

[0643] In some embodiments, components of a prime editing composition form a complex prior to delivery to a target cell. For example, a prime editor fusion protein, a PEgRNA, and/or a ngRNA can form a complex prior to delivery to the target cell. In some embodiments, a prime editing polypeptide (e.g., a prime editor fusion protein) and a guide polynucleotide (e.g. a PEgRNA or ngRNA) form a ribonucleoprotein (RNP) for delivery to a target cell. In some embodiments, the RNP comprises a prime editor fusion protein in complex with a PEgRNA. RNPs may be delivered to cells using known methods, such as electroporation, nucleofection, or cationic lipid-mediated methods, or any other approaches known in the art. In some embodiments, delivery of a prime editing composition or complex to the target cell does not require the delivery of foreign DNA into the cell. In some embodiments, the RNP comprising the prime editing complex is degraded over time in the target cell. Exemplary lipids for use in nanoparticle formulations and/or gene transfer are shown in Table 92 and 93 below.

TABLE 92
Exemplary lipids for nanoparticle formulation or gene transfer

| Lipid | Abbreviation | Feature |
|---|---|---|
| 1,2-Dioleoyl-sn-glycero-3-phosphatidylcholine | DOPC | Helper |
| 1,2-Dioleoyl-sn-glycero-3-phosphatidylethanolamine | DOPE | Helper |
| Cholesterol | | Helper |
| N41-(2,3-Dioleyloxy)prophyliN,N,N-trimethylammonium | DOTMA | Cationic |
| chloride | | |
| 1,2-Dioleoyloxy-3-trimethylammonium-propane | DOGS | Cationic |
| Dioctadecylamidoglycylspermine | | |
| N-(3-Aminopropy1)-N,N-dimethy1-2,3-bis(dodecyloxy)-1- | GAP-DLRIE | Cationic |
| propanaminium bromide | | |
| Cetyltrimethylammonium bromide | CTAB | Cationic |
| 6-Lauroxyhexyl omithinate | LHON | Cationic |
| 1-(2,3-Dioleoyloxypropy1)-2,4,6-trimethylpyridinium | 2Oc | Cationic |
| 2,3-Dioleyloxy-N-P(spenninecarboxamido-ethy1J-N,Ndimethyl- | DOSPA | Cationic |
| 1-propanatninium trifluoroacetate | | |
| 1,2-Dioley1-3-trimethylamtnonium-propane | DOPA | Cationic |
| N-(2-Hydroxyethyl)-N,N-dimethy 1-2,3-bis(tetradecyloxy)-1- | MDRIE | Cationic |
| propanaminium bromide | | |
| Dimyristooxypropyl dimethyl hydroxyethyl ammonium bromide | DMRI | Cationic |
| 3β-[N-(N′,N′-Dimethylaminoethane)-carbamoyl]cholesterol | DC-Chol | Cationic |
| Bis-guanidium-tren-cholesterol | BGTC | Cationic |
| 1,3-Diodeoxy-2-(6-carboxy-spermy1)-propylamide | DOSPER | Cationic |
| Dimethyloctadecylammonium bromide | DDAB | Cationic |
| Dioctadecylamidoglicylspermidin | DSL | Cationic |
| rac-[(2,3-Dioctadecyloxypropyl)(2-hydroxyethyl)]- | CLIP-1 | Cationic |
| dimethylammonium chloride | | |
| rac-[2(2,3-Dihexadecyloxypropyloxymethyloxy) | CLIP-6 | Cationic |
| ethyl]trimethylammoniun bromide | | |
| Ethyldimyristoylphosphatidylcholine | EDMPC | Cationic |
| 1,2-Distearyloxy-N,N-dimethyl-3-aminopropane | DSDMA | Cationic |
| 1,2-Dimyristoyl-trimethylammonium propane | DMTAP | Cationic |
| O,O′-Dimyristyl-N-lysyl aspartate | DMKE | Cationic |
| 1,2-Distearoyl-sn-glycero-3-ethylpho sphocholine | DSEPC | Cationic |
| N-Palmitoyl D-erythro-sphingosyl carbamoyl-spenmine | CCS | Cationic |
| N-t-Butyl-N0-tetradecyl-3-tetradecylaminopropionamidine | diC14-amidine | Cationic |
| Octadecenolyoxy[ethyl-2-heptadecenyl-3 hydroxyethyl] | DOTIM | Cationic |
| imidazolinium chloride | | |
| N1-Cholesteryloxycarbonyl-3,7-diazanonane-1,9-diamine | CDAN | Cationic |
| 2-(3-Bis(3-amino-propy1)-amino]propylamino)- | RPR209120 | Cationic |
| Nditetradecylcarbamoylme-ethyl-acetamide | | |
| 1,2-dilinoleyloxy-3-dimethylaminopropane | DLinDMA | Cationic |
| 2,2-dilinoley1-4-dimethylaminoethyl-[1,3]-dioxolane | DLin-KC2-DMA | Cationic |
| dilinoleyl-methyl-4-dimethylaminobutyrate | DLin-MC3-DMA | Cationic |

[0644] Exemplary polymers for use in nanoparticle formulations and/or gene transfer are shown in Table 4 below.

TABLE 93
Exemplary lipids for nanoparticle formulation or gene transfer

| Polymer | Abbreviation |
|---|---|
| Poly(ethylene)glycol | PEG |
| Polyethylenimine | PEI |
| Dithiobis (succinimidylpropionate) | DSP |
| Dimethyl-3,3′-dithiobispropionimidate | DTBP |
| Poly(ethylene imine)biscarbamate | PEIC |
| Poly(L-lysine) | PLL |
| Histidine modified PLL | |
| Poly(N-vinylpyrrolidone) | PVP |
| Poly(propylenimine) | PPI |
| Poly(amidoamine) | PAMAM |
| Poly(amidoethylenimine) | SS_PAEI |
| Triethylenetetramine | TETA |
| Poly(β-aminoester) | |
| Poly(4-hydroxy-L-proline ester) | PHP |
| Poly(allylamine) | |
| Poly(α-[4-aminobutyl]-L-glycolic acid) | PAGA |
| Poly(D,L-lactic-co-glycolic acid) | PLGA |
| Poly(N-ethyl-4-vinylpyridinium bromide) | |
| Poly(phosphazene)s | PPZ |
| Poly (phosphoester)s | PPE |
| Poly(phosphoramidate)s | PPA |
| Poly(N-2-hydroxypropylmethacrylamide) | pHPMA |
| Poly (2-(dimethylamino)ethyl methacrylate) | pDMAEMA |
| Poly(2-aminoethyl propylene phosphate) | PPE-EA |
| Chitosan | |
| Galactosylated chitosan | |
| N-dodacylated chitosam | |
| Histone | |
| Collagen | |
| Dextran-spermine | D-SPM |

[0645] Exemplary delivery methods for polynucleotides encoding prime editing composition components are shown in Table 94 below.

TABLE 94
Exemplary polynucleotide delivery methods

| | | Delivery into | | | Type of |
|---|---|---|---|---|---|
| | | Non-Dividing | Duration of | Genome | Molecule |
| Delivery | Vector/Mode | Cells | Expression | Integration | Delivered |
| Physical | (e.g., electroporation, | YES | Transient | NO | Nucleic Acids |
| | particle gun, Calcium | | | | and Proteins |
| | phosphate transfection) | | | | |
| Viral | Retrovirus | NO | Stable | YES | RNA |
| | Lentivirus | YES | Stable | YES/NO with | RNA |
| | | | | modification | |
| | Adenovirus | YES | Transient | NO | DNA |
| | Adeno-Associated | YES | Stable | NO | DNA |
| | Virus (AAV) | | | | |
| | Vaccinia Virus | YES | Very | NO | DNA |
| | | | Transient | | |
| | Herpes Simplex | YES | Stable | NO | DNA |
| | Virus | | | | |
| Non-Viral | Cationic | YES | Transient | Depends on | Nucleic acids |
| | | | | what is | and Proteins |
| | | | | delivered | |
| | Polymeric | YES | Transient | NO | Nucleic Acids |
| | Nanoparticles | | | | |
| Biological | Attenuated Bacteria | YES | Transient | NO | Nucleic Acids |
| Non-Viral | Engineered | YES | Transient | NO | Nucleic Acids |
| Delivery | Bacteriophages | | | | |
| Vehicles | Mammalian Virus- | YES | Transient | NO | Nucleic Acids |
| | like Particles | | | | |
| | Biological liposomes: | YES | Transient | NO | Nucleic Acids |
| | Erythrocyte Ghosts | | | | |
| | and Exosomes | | | | |

[0646] The prime editing compositions of the disclosure, whether introduced as polynucleotides or polypeptides, can be provided to the cells for about 30 minutes to about 24 hours. e.g., 1 hour. 1.5 hours, 2 hours. 2.5 hours, 3 hours, 3.5 hours 4 hours, 5 hours, 6 hours. 7 hours, 8 hours, 12 hours, 16 hours. 18 hours. 20 hours, or any other period from about 30 minutes to about 24 hours, which can be repeated with a frequency of about every day to about every 4 days. e.g., every 1.5 days, every 2 days, every 3 days, or any other frequency from about every day to about every four days. The compositions may be provided to the subject cells one or more times, e.g., one time, twice, three times, or more than three times, and the cells allowed to incubate with the agent(s) for some amount of time following each contacting event e.g., 16-24 hours. In cases in which two or more different prime editing system components. e.g., two different polynucleotide constructs are provided to the cell (e.g., different components of the same prim editing system, or two different guide nucleic acids that are complementary to different sequences within the same or different target genes), the compositions may be delivered simultaneously (e.g., as two polypeptides and/or nucleic acids). Alternatively, they may be provided sequentially, e.g., one composition being provided first, followed by a second composition.

[0647] The prime editing compositions and pharmaceutical compositions of the disclosure, whether introduced as polynucleotides or polypeptides, can be administered to subjects in need thereof for about 30 minutes to about 24 hours, e.g., 1 hour. 1.5 hours, 2 hours, 2.5 hours. 3 hours, 3.5 hours 4 hours. 5 hours, 6 hours. 7 hours, 8 hours, 12 hours, 16 hours. 18 hours, 20 hours, or any other period from about 30 minutes to about 24 hours, which can be repeated with a frequency of about every day to about every 4 days. e.g., every 1.5 days, every 2 days, every 3 days, or any other frequency from about every day to about every four days. The compositions may be provided to the subject one or more times, e.g., one time, twice, three times, or more than three times. In cases in which two or more different prime editing system components. e.g. two different polynucleotide constructs are administered to the subject (e.g., different components of the same prim editing system, or two different guide nucleic acids that are complementary to different sequences within the same or different target genes), the compositions may be administered simultaneously (e.g., as two polypeptides and/or nucleic acids). Alternatively, they may be provided sequentially. e.g., one composition being provided first, followed by a second composition. The disclosure is not limited to the embodiments described and exemplified above, but is capable of variation and modification within the scope of the appended claims.

### EXAMPLES

[0648] The following examples are provided for illustrative purposes only and are not intended to limit the scope of the claims provided herein

### Example 1—General Methods

[0649] PEgRNA assembly: PEgRNA libraries are assembled by one of three methods: in the first method, pooled synthesized DNA oligos encoding the PEgRNA and flanking U6 expression plasmid homology regions are cloned into U6 expression plasmids via Gibson cloning and sequencing of bacterial colonies via Sanger or Next-generation sequencing. In the second method, double-stranded linear DNA fragments encoding PEgRNA and homology sequences as above are individually Gibson-cloned into U6 expression plasmids. In the third method, for each PEgRNA, separate oligos encoding a protospacer, a gRNA scaffold, and PEgRNA extension (PBS and RTT) are ligated, and then cloned into a U6 expression plasmid as described in Anzalone et al., Nature. 2019 December; 576(7785):149-157. Bacterial colonies carrying sequence-verified plasmids are propagated in LB or TB. Plasmid DNA is purified by minipreps for mammalian transfection.

[0650] Mammalian cell culture and transfection: HEK293T and Huh-7 cells are propagated in DMEM with 10% FBS. HepG2 cells are propagated in EMEM with 10% FBS. Cells are seeded in 96-well plates and then transfected with Lipofectamine 2000 according to the manufacturer's directions with DNA encoding a prime editor, PEgRNA, and (if applicable) ngRNA. Alternatively, cells are transfected with MessengerMax according to the manufacturer's directions with mRNA encoding a prime editor, synthetic PEgRNA, and (if applicable) ngRNA. Three days after transfection, gDNA is harvested in lysis buffer for high throughput sequencing and sequenced using miseq.

[0651] Lentiviral production and cell line generation: Lentiviral transfer plasmids containing the R778L mutation with flanking sequences from the ATP7B gene on each side, and an IRES-Puromycin selection cassette, are cloned behind an EF1α short promoter. HEK 293T cells are transiently transfected with the transfer plasmids and packaging plasmids containing VSV glycoprotein and lentiviral gag/pol coding sequences. After transfection, lentiviral particles are harvested from the cell media and concentrated. HEK 293T cells are transduced using serial dilutions of the lentiviral particles described above. Cells generated at a dilution of MOI<1, as determined by survival following puromycin, are selected for expansion. A resulting HEK293T cell line carrying the R778L mutation is used to screen PEgRNAs.

[0652] ATP7B R778L correction with PE2system: An ATP7B R778L mutation is installed at the endogenous ATP7B locus in HEK 293T, Huh-7, and HepG2 cells by prime editing and single-cell clones are obtained via limiting dilution and clonal expansion.

[0653] Prime Editing in Primary Human Hepatocytes: Primary human hepatocytes are transduced with lentivirus encoding the R778L cassette 2 days after cryorecovery, followed 6 days later by transfection with RNA encoding a prime editor, PEgRNA, and (if applicable) ngRNA. Genomic DNA is harvested after a 1-week incubation.

### Example 2—Screen of Cas9 Cutting Activity at Spacers within 95 nt of the ATP7B R778L Mutation Site

[0654] A spacer screen was performed to investigate Cas9 cutting activity at sites within 95 nucleotides (nts) of the R778L mutation site in the ATP7B gene. HEK293T cells were cultured and transfected with mRNA encoding a Cas9 and gRNA as described above. In this experiment, the gRNA were synthesized as crRNA, which contains the indicated spacer, and tracrRNA, which were allowed to anneal prior to transfection. The crRNA and tracrRNA were ordered from IDT and contained their “Alt-R” chemical end PGP-44 Tt M protection. The results are shown in Table 95.

TABLE 95
Spacer screen for Cas9 cutting activity within 95
nt of the R778L mutation site in the ATP7B gene

| | Nick-to-edit | | | PAM oriented for |
|---|---|---|---|---|
| Spacer¹ | distance to R778L | | Percent | Prime Editing of |
| SEQ ID NO: | mutation (nt) | PAM | Indel² | R778L Site |
| 2009 | −94 | NGA | + | NO |
| 5926, 1238 | −88 | NGA | ++ | YES |
| 2021, 1239 | −86 | NGG | +++ | YES |
| 5963, 1222 | −85 | NGA | + | YES |
| 6007, 1220 | −80 | NGA | +++ | YES |
| 1991 | −80 | NGA | ++++ | NO |
| 6051, 1240 | −78 | NGA | + | YES |
| 6097, 1233 | −66 | NGA | + | YES |
| 2067, 1223 | −63 | NGG | + | YES |
| 6154, 1234 | −62 | NGA | ++++ | YES |
| 6217, 1228 | −47 | NGA | + | YES |
| 1996 | −44 | NGA | ++++ | NO |
| 6295, 1229 | −41 | NGA | + | YES |
| 1995 | −39 | NGA | + | NO |
| 1997 | −33 | NGG | +++ | NO |
| 1990 | −17 | NGG | ++++ | NO |
| 2132, 62 | −4 | NGG | +++ | YES |
| (Spacer 1) | | | | |
| 1732 | 2 | NGG | + | YES |
| (Spacer 2) | | | | |
| 1533, 2057 | 9 | NGG | +++ | YES |
| (Spacer 3) | | | | |
| 738, 2056 | 10 | NGG | ++ | YES |
| (Spacer 4) | | | | |
| 97 | 18 | NGA | ++++ | NO |
| 68 | 24 | NGG | ++ | NO |
| 76 | 25 | NGG | ++ | NO |
| 98 | 26 | NGG | ++ | NO |
| 95 | 27 | NGG | ++ | NO |
| 85 | 28 | NGG | +++ | NO |
| 78 | 36 | NGA | + | NO |
| 81 | 39 | NGA | + | NO |
| 5846, 3248 | 45 | NGA | ++ | YES |
| 96 | 49 | NGG | +++ | NO |
| 61 | 50 | NGG | ++++ | NO |
| 5629, 3277 | 55 | NGA | ++ | YES |
| 4676, 3283 | 64 | NGA | ++++ | YES |
| 532, 3268 | 65 | NGG | +++ | YES |
| 4311, 3282 | 67 | NGA | ++++ | YES |
| 4255, 3285 | 69 | NGA | ++++ | YES |
| 384, 3269 | 70 | NGG | ++ | YES |
| 302, 3260 | 73 | NGG | ++ | YES |
| 4180, 3263 | 76 | NGA | + | YES |
| 4132, 3266 | 78 | NGA | ++++ | YES |
| 197, 3279 | 82 | NGG | +++ | YES |
| 67 | 86 | NGG | ++++ | NO |
| 71 | 87 | NGA | +++ | NO |
| 75 | 90 | NGA | +++ | NO |
| 123, 3244 | 91 | NGG | +++ | YES |
| 5, 3275 | 94 | NGG | ++ | YES |
| 4175 | 95 | NGA | ++++ | NO |

¹The indicated sequence sequences recite only the spacer; the gRNA used were synthesized as crRNA and tracrRNA, which were allowed to anneal before transfection. Some spacers are identified by two SEQ ID NOs because the same spacer sequence was assigned a different SEQ ID NO in the cluster tables depending upon whether it was included as a ngRNA spacer or a PEgRNA spacer; the first indicated spacer of the pair is the PEgRNA spacer.
²+ = 0.23%-21.13%; ++ = 21.13%-49.62%; +++ 49.62%-58.79%; ++++ = 58.79%-88.45%

### Example 3—Prime Editing at a Lentivirus-Introduced ATP7B R778L Mutation Site in HEK293T Cells Using a PE2 System

[0655] Four exemplary PEgRNA spacers close to the R778L mutation site are shown in FIG. 3A. In FIG. 3A, Spacer 1 corresponds to SEQ ID NO: 2132, Spacer 2 corresponds to SEQ ID NO: 1732, Spacer 3 corresponds to SEQ ID NO: 1533, and Spacer 4 corresponds to SEQ ID NO: 738. Exemplary PEgRNA based on Spacer 1 and ngRNA compatible those PEgRNA are disclosed in Table 13. Exemplary PEgRNA based on Spacer 2 and ngRNA compatible those PEgRNA are disclosed in Table 9. Exemplary PEgRNA based on Spacer3 and ngRNA compatible those PEgRNA are disclosed in Table 8. Exemplary PEgRNA based on Spacer 4 and ngRNA compatible those PEgRNA are disclosed in Table 7. PEgRNA incorporating these spacers were designed and screened for Prime Editing efficiency in a HEK293T ceil line containing a lentivirus-introduced R778L mutation. The cell line was generated as described in Example 1. These spacers were selected because they are close to the R778L mutation site and would produce a nick that is 5′ of the R778L mutation site when used in conjunction with a prime editor having a Cas9 protein containing an inactivating mutation in the HNH nuclease domain. Each of these spacers also showed at least some activity in the spacer screen of Example 2.

[0656] PEgRNAs were designed and screened in a PE2 system. The HEK 293T cell line as described above was expanded and transiently transfected with a PE and PEgRNA in arrayed 96-well plates for assessment of editing by high-throughput sequencing, as shown schematically in FIG. 3B. In this initial screen, multiple primer binding site (PBS) and reverse transcription template (RTT) lengths were tested for each of the four exemplary spacers. All the PEgRNA were designed to restore the wild-type nucleic acid sequence at the R778L site. Where possible, PEgRNAs were designed to also introduce synonymous mutations that silence the PAM sequence.

[0657] The results for individual PEgRNA are shown in Table 96. Successful Prime Editing was observed across PBS and RTT lengths, with and without PAM silencing. The percent editing observed for all PEgRNA having the same spacer were averaged, and the results reported in Table 97.

TABLE 96
PE2 Screen at R778L mutation site in HEK293T cells

| PEgRNA¹ | Spacer | RTT² | | PBS | | |
|---|---|---|---|---|---|---|
| Sequence | Sequence | Sequence | RTT | Sequence | PBS | Percent |
| Number | Number | Number | Length | Number | Length | Edit³ |
| 3300 | 2132 | 2155 *57 | 10 | 2140 | 8 | ++ |
| 3319 | 2132 | 2155 *57 | 10 | 2142 | 10 | ++ |
| 3337 | 2132 | 2155 *57 | 10 | 2144 | 12 | − |
| 3380 | 2132 | 2155 *57 | 10 | 2146 | 14 | +++ |
| 3333 | 2132 | 2211 *57 | 14 | 2140 | 8 | +++ |
| 3398 | 2132 | 2211 *57 | 14 | 2142 | 10 | ++++ |
| 3454 | 2132 | 2211 *57 | 14 | 2144 | 12 | − |
| 3545 | 2132 | 2211 *57 | 14 | 2146 | 14 | ++++ |
| 3354 | 2132 | 2216 *57 | 15 | 2140 | 8 | +++ |
| 3413 | 2132 | 2216 *57 | 15 | 2142 | 10 | ++++ |
| 3496 | 2132 | 2216 *57 | 15 | 2144 | 12 | − |
| 3592 | 2132 | 2216 *57 | 15 | 2146 | 14 | ++++ |
| 3390 | 2132 | 2227 *57 | 16 | 2140 | 8 | +++ |
| 3450 | 2132 | 2227 *57 | 16 | 2142 | 10 | ++++ |
| 3532 | 2132 | 2227 *57 | 16 | 2144 | 12 | − |
| 3638 | 2132 | 2227 *57 | 16 | 2146 | 14 | ++++ |
| 3410 | 2132 | 2245 *57 | 17 | 2140 | 8 | +++ |
| 3509 | 2132 | 2245 *57 | 17 | 2142 | 10 | ++++ |
| 3621 | 2132 | 2245 *57 | 17 | 2144 | 12 | − |
| 3680 | 2132 | 2245 *57 | 17 | 2146 | 14 | − |
| 3495 | 2132 | 2260 *57 | 19 | 2140 | 8 | +++ |
| 3620 | 2132 | 2260 *57 | 19 | 2142 | 10 | ++++ |
| 3677 | 2132 | 2260 *57 | 19 | 2144 | 12 | − |
| 3815 | 2132 | 2260 *57 | 19 | 2146 | 14 | ++++ |
| 3536 | 2132 | 2282 *57 | 20 | 2140 | 8 | ++++ |
| 3636 | 2132 | 2282 *57 | 20 | 2142 | 10 | ++++ |
| 3738 | 2132 | 2282 *57 | 20 | 2144 | 12 | − |
| 3855 | 2132 | 2282 *57 | 20 | 2146 | 14 | ++++ |
| 3305 | 2132 | 2159 *58 | 10 | 2140 | 8 | ++ |
| 3323 | 2132 | 2159 *58 | 10 | 2142 | 10 | + |
| 3339 | 2132 | 2159 *58 | 10 | 2144 | 12 | − |
| 3399 | 2132 | 2159 *58 | 10 | 2146 | 14 | ++ |
| 3341 | 2132 | 2201 *58 | 14 | 2140 | 8 | + |
| 3385 | 2132 | 2201 *58 | 14 | 2142 | 10 | +++ |
| 3449 | 2132 | 2201 *58 | 14 | 2144 | 12 | − |
| 3539 | 2132 | 2201 *58 | 14 | 2146 | 14 | +++ |
| 3365 | 2132 | 2215 *58 | 15 | 2140 | 8 | ++++ |
| 3426 | 2132 | 2215 *58 | 15 | 2142 | 10 | ++++ |
| 3506 | 2132 | 2215 *58 | 15 | 2144 | 12 | − |
| 3618 | 2132 | 2215 *58 | 15 | 2146 | 14 | ++++ |
| 3373 | 2132 | 2235 *58 | 16 | 2140 | 8 | +++ |
| 3437 | 2132 | 2235 *58 | 16 | 2142 | 10 | ++++ |
| 3571 | 2132 | 2235 *58 | 16 | 2144 | 12 | − |
| 3664 | 2132 | 2235 *58 | 16 | 2146 | 14 | ++++ |
| 3424 | 2132 | 2240 *58 | 17 | 2140 | 8 | ++++ |
| 3479 | 2132 | 2240 *58 | 17 | 2142 | 10 | ++++ |
| 3604 | 2132 | 2240 *58 | 17 | 2144 | 12 | − |
| 3681 | 2132 | 2240 *58 | 17 | 2146 | 14 | ++++ |
| 3518 | 2132 | 2269 *58 | 19 | 2140 | 8 | +++ |
| 3600 | 2132 | 2269 *58 | 19 | 2142 | 10 | +++ |
| 3717 | 2132 | 2269 *58 | 19 | 2144 | 12 | − |
| 3775 | 2132 | 2269 *58 | 19 | 2146 | 14 | +++ |
| 3572 | 2132 | 2277 *58 | 20 | 2140 | 8 | +++ |
| 3660 | 2132 | 2277 *58 | 20 | 2142 | 10 | ++++ |
| 3768 | 2132 | 2277 *58 | 20 | 2144 | 12 | − |
| 3854 | 2132 | 2277 *58 | 20 | 2146 | 14 | ++++ |
| 3306 | 2132 | 2154 *59 | 10 | 2140 | 8 | ++ |
| 3318 | 2132 | 2154 *59 | 10 | 2142 | 10 | ++ |
| 3342 | 2132 | 2154 *59 | 10 | 2144 | 12 | − |
| 3401 | 2132 | 2154 *59 | 10 | 2146 | 14 | ++ |
| 3343 | 2132 | 2204 *59 | 14 | 2140 | 8 | +++ |
| 3388 | 2132 | 2204 *59 | 14 | 2142 | 10 | ++++ |
| 3472 | 2132 | 2204 *59 | 14 | 2144 | 12 | − |
| 3577 | 2132 | 2204 *59 | 14 | 2146 | 14 | − |
| 3358 | 2132 | 2218 *59 | 15 | 2140 | 8 | ++++ |
| 3418 | 2132 | 2218 *59 | 15 | 2142 | 10 | ++++ |
| 3492 | 2132 | 2218 *59 | 15 | 2144 | 12 | − |
| 3603 | 2132 | 2218 *59 | 15 | 2146 | 14 | +++ |
| 3376 | 2132 | 2232 *59 | 16 | 2140 | 8 | ++++ |
| 3446 | 2132 | 2232 *59 | 16 | 2142 | 10 | +++ |
| 3542 | 2132 | 2232 *59 | 16 | 2144 | 12 | − |
| 3628 | 2132 | 2232 *59 | 16 | 2146 | 14 | +++ |
| 3421 | 2132 | 2242 *59 | 17 | 2140 | 8 | ++++ |
| 3511 | 2132 | 2242 *59 | 17 | 2142 | 10 | ++++ |
| 3599 | 2132 | 2242 *59 | 17 | 2144 | 12 | − |
| 3712 | 2132 | 2242 *59 | 17 | 2146 | 14 | ++++ |
| 3494 | 2132 | 2271 *59 | 19 | 2140 | 8 | ++++ |
| 3583 | 2132 | 2271 *59 | 19 | 2142 | 10 | +++ |
| 3713 | 2132 | 2271 *59 | 19 | 2144 | 12 | − |
| 3783 | 2132 | 2271 *59 | 19 | 2146 | 14 | ++++ |
| 3560 | 2132 | 2280 *59 | 20 | 2140 | 8 | +++ |
| 3650 | 2132 | 2280 *59 | 20 | 2142 | 10 | ++++ |
| 3742 | 2132 | 2280 *59 | 20 | 2144 | 12 | − |
| 3834 | 2132 | 2280 *59 | 20 | 2146 | 14 | ++++ |
| 3304 | 2132 | 2160 *60 | 10 | 2140 | 8 | ++ |
| 3317 | 2132 | 2160 *60 | 10 | 2142 | 10 | +++ |
| 3338 | 2132 | 2160 *60 | 10 | 2144 | 12 | − |
| 3379 | 2132 | 2160 *60 | 10 | 2146 | 14 | ++++ |
| 3340 | 2132 | 2206 *60 | 14 | 2140 | 8 | +++ |
| 3403 | 2132 | 2206 *60 | 14 | 2142 | 10 | +++ |
| 3457 | 2132 | 2206 *60 | 14 | 2144 | 12 | − |
| 3567 | 2132 | 2206 *60 | 14 | 2146 | 14 | ++++ |
| 3370 | 2132 | 2214 *60 | 15 | 2140 | 8 | +++ |
| 3405 | 2132 | 2214 *60 | 15 | 2142 | 10 | +++ |
| 3480 | 2132 | 2214 *60 | 15 | 2144 | 12 | − |
| 3619 | 2132 | 2214 *60 | 15 | 2146 | 14 | +++ |
| 3372 | 2132 | 2224 *60 | 16 | 2140 | 8 | +++ |
| 3456 | 2132 | 2224 *60 | 16 | 2142 | 10 | ++++ |
| 3575 | 2132 | 2224 *60 | 16 | 2144 | 12 | − |
| 3643 | 2132 | 2224 *60 | 16 | 2146 | 14 | +++ |
| 3416 | 2132 | 2243 *60 | 17 | 2140 | 8 | ++++ |
| 3519 | 2132 | 2243 *60 | 17 | 2142 | 10 | ++++ |
| 3625 | 2132 | 2243 *60 | 17 | 2144 | 12 | − |
| 3679 | 2132 | 2243 *60 | 17 | 2146 | 14 | ++ |
| 3481 | 2132 | 2268 *60 | 19 | 2140 | 8 | +++ |
| 3607 | 2132 | 2268 *60 | 19 | 2142 | 10 | − |
| 3678 | 2132 | 2268 *60 | 19 | 2144 | 12 | − |
| 3798 | 2132 | 2268 *60 | 19 | 2146 | 14 | ++++ |
| 3573 | 2132 | 2281 *60 | 20 | 2140 | 8 | +++ |
| 3649 | 2132 | 2281 *60 | 20 | 2142 | 10 | ++++ |
| 3725 | 2132 | 2281 *60 | 20 | 2144 | 12 | − |
| 3842 | 2132 | 2281 *60 | 20 | 2146 | 14 | ++++ |
| 3302 | 2132 | 2153 *61 | 10 | 2140 | 8 | + |
| 3316 | 2132 | 2153 *61 | 10 | 2142 | 10 | + |
| 3335 | 2132 | 2153 *61 | 10 | 2144 | 12 | − |
| 3383 | 2132 | 2153 *61 | 10 | 2146 | 14 | ++ |
| 3345 | 2132 | 2202 *61 | 14 | 2140 | 8 | +++ |
| 3386 | 2132 | 2202 *61 | 14 | 2142 | 10 | +++ |
| 3441 | 2132 | 2202 *61 | 14 | 2144 | 12 | − |
| 3574 | 2132 | 2202 *61 | 14 | 2146 | 14 | +++ |
| 3367 | 2132 | 2222 *61 | 15 | 2140 | 8 | +++ |
| 3408 | 2132 | 2222 *61 | 15 | 2142 | 10 | ++++ |
| 3488 | 2132 | 2222 *61 | 15 | 2144 | 12 | − |
| 3605 | 2132 | 2222 *61 | 15 | 2146 | 14 | +++ |
| 3394 | 2132 | 2229 *61 | 16 | 2140 | 8 | +++ |
| 3455 | 2132 | 2229 *61 | 16 | 2142 | 10 | ++++ |
| 3559 | 2132 | 2229 *61 | 16 | 2144 | 12 | − |
| 3661 | 2132 | 2229 *61 | 16 | 2146 | 14 | +++ |
| 3432 | 2132 | 2236 *61 | 17 | 2140 | 8 | ++++ |
| 3523 | 2132 | 2236 *61 | 17 | 2132 | 10 | ++++ |
| 3593 | 2132 | 2236 *61 | 17 | 2144 | 12 | − |
| 3710 | 2132 | 2236 *61 | 17 | 2146 | 14 | ++++ |
| 3486 | 2132 | 2264 *61 | 19 | 2140 | 8 | +++ |
| 3595 | 2132 | 2264 *61 | 19 | 2142 | 10 | ++++ |
| 3702 | 2132 | 2264 *61 | 19 | 2144 | 12 | − |
| 3795 | 2132 | 2264 *61 | 19 | 2146 | 14 | ++++ |
| 3544 | 2132 | 2276 *61 | 20 | 2140 | 8 | ++++ |
| 3662 | 2132 | 2276 *61 | 20 | 2142 | 10 | ++++ |
| 3724 | 2132 | 2276 *61 | 20 | 2144 | 12 | − |
| 3856 | 2132 | 2276 *61 | 20 | 2146 | 14 | ++++ |
| 3307 | 2132 | 2152 *62 | 10 | 2140 | 8 | +++ |
| 3322 | 2132 | 2152 *62 | 10 | 2142 | 10 | +++ |
| 3344 | 2132 | 2152 *62 | 10 | 2144 | 12 | − |
| 3400 | 2132 | 2152 *62 | 10 | 2146 | 14 | +++ |
| 3346 | 2132 | 2200 *62 | 14 | 2140 | 8 | +++ |
| 3389 | 2132 | 2200 *62 | 14 | 2142 | 10 | ++++ |
| 3464 | 2132 | 2200 *62 | 14 | 2144 | 12 | − |
| 3579 | 2132 | 2200 *62 | 14 | 2146 | 14 | ++++ |
| 3353 | 2132 | 2221 *62 | 15 | 2140 | 8 | +++ |
| 3406 | 2132 | 2221 *62 | 15 | 2142 | 10 | ++++ |
| 3515 | 2132 | 2221 *62 | 15 | 2144 | 12 | − |
| 3608 | 2132 | 2221 *62 | 15 | 2146 | 14 | +++ |
| 3375 | 2132 | 2225 *62 | 16 | 2140 | 8 | +++ |
| 3473 | 2132 | 2225 *62 | 16 | 2142 | 10 | ++++ |
| 3565 | 2132 | 2225 *62 | 16 | 2144 | 12 | − |
| 3653 | 2132 | 2225 *62 | 16 | 2146 | 14 | − |
| 3428 | 2132 | 2244 *62 | 17 | 2140 | 8 | +++ |
| 3477 | 2132 | 2244 *62 | 17 | 2142 | 10 | ++++ |
| 3626 | 2132 | 2244 *62 | 17 | 2144 | 12 | − |
| 3700 | 2132 | 2244 *62 | 17 | 2146 | 14 | ++++ |
| 3514 | 2132 | 2262 *62 | 19 | 2140 | 8 | ++++ |
| 3602 | 2132 | 2262 *62 | 19 | 2142 | 10 | ++++ |
| 3711 | 2132 | 2262 *62 | 19 | 2144 | 12 | − |
| 3776 | 2132 | 2262 *62 | 19 | 2146 | 14 | +++ |
| 3548 | 2132 | 2272 *62 | 20 | 2140 | 8 | +++ |
| 3634 | 2132 | 2272 *62 | 20 | 2142 | 10 | ++++ |
| 3739 | 2132 | 2272 *62 | 20 | 2144 | 12 | − |
| 3852 | 2132 | 2272 *62 | 20 | 2146 | 14 | ++++ |
| 3303 | 2132 | 2157 *63 | 10 | 2140 | 8 | ++ |
| 3321 | 2132 | 2157 *63 | 10 | 2142 | 10 | ++ |
| 3336 | 2132 | 2157 *63 | 10 | 2144 | 12 | − |
| 3374 | 2132 | 2157 *63 | 10 | 2146 | 14 | ++ |
| 3347 | 2132 | 2205 *63 | 14 | 2140 | 8 | +++ |
| 3384 | 2132 | 2205 *63 | 14 | 2142 | 10 | ++++ |
| 3448 | 2132 | 2205 *63 | 14 | 2144 | 12 | − |
| 3543 | 2132 | 2205 *63 | 14 | 2146 | 14 | +++ |
| 3357 | 2132 | 2212 *63 | 15 | 2140 | 8 | ++ |
| 3431 | 2132 | 2212 *63 | 15 | 2142 | 10 | ++++ |
| 3504 | 2132 | 2212 *63 | 15 | 2144 | 12 | − |
| 3597 | 2132 | 2212 *63 | 15 | 2146 | 14 | +++ |
| 3381 | 2132 | 2233 *63 | 16 | 2140 | 8 | ++++ |
| 3462 | 2132 | 2233 *63 | 16 | 2142 | 10 | ++++ |
| 3527 | 2132 | 2233 *63 | 16 | 2144 | 12 | − |
| 3663 | 2132 | 2233 *63 | 16 | 2146 | 14 | − |
| 3434 | 2132 | 2237 *63 | 17 | 2140 | 8 | +++ |
| 3485 | 2132 | 2237 *63 | 17 | 2142 | 10 | ++++ |
| 3609 | 2132 | 2237 *63 | 17 | 2144 | 12 | − |
| 3682 | 2132 | 2237 *63 | 17 | 2146 | 14 | ++++ |
| 3500 | 2132 | 2265 *63 | 19 | 2140 | 8 | +++ |
| 3612 | 2132 | 2265 *63 | 19 | 2142 | 10 | ++++ |
| 3703 | 2132 | 2265 *63 | 19 | 2144 | 12 | − |
| 3811 | 2132 | 2265 *63 | 19 | 2146 | 14 | ++++ |
| 3531 | 2132 | 2274 *63 | 20 | 2140 | 8 | +++ |
| 3640 | 2132 | 2274 *63 | 20 | 2142 | 10 | ++++ |
| 3745 | 2132 | 2274 *63 | 20 | 2144 | 12 | − |
| 3841 | 2132 | 2274 *63 | 20 | 2146 | 14 | ++++ |
| 3301 | 2132 | 2162 | 10 | 2140 | 8 | +++ |
| 3320 | 2132 | 2162 | 10 | 2142 | 10 | ++ |
| 3332 | 2132 | 2162 | 10 | 2144 | 12 | − |
| 3392 | 2132 | 2162 | 10 | 2146 | 14 | +++ |
| 3334 | 2132 | 2209 | 14 | 2140 | 8 | ++ |
| 3396 | 2132 | 2209 | 14 | 2142 | 10 | +++ |
| 3461 | 2132 | 2209 | 14 | 2144 | 12 | − |
| 3524 | 2132 | 2209 | 14 | 2146 | 14 | +++ |
| 3362 | 2132 | 2223 | 15 | 2140 | 8 | ++ |
| 3435 | 2132 | 2223 | 15 | 2142 | 10 | − |
| 3491 | 2132 | 2223 | 15 | 2144 | 12 | − |
| 3596 | 2132 | 2223 | 15 | 2146 | 14 | +++ |
| 3393 | 2132 | 2226 | 16 | 2140 | 8 | +++ |
| 3442 | 2132 | 2226 | 16 | 2142 | 10 | − |
| 3537 | 2132 | 2226 | 16 | 2144 | 12 | − |
| 3657 | 2132 | 2226 | 16 | 2146 | 14 | +++ |
| 3429 | 2132 | 2238 | 17 | 2140 | 8 | ++ |
| 3499 | 2132 | 2238 | 17 | 2142 | 10 | − |
| 3624 | 2132 | 2238 | 17 | 2144 | 12 | − |
| 3687 | 2132 | 2238 | 17 | 2146 | 14 | +++ |
| 3520 | 2132 | 2263 | 19 | 2140 | 8 | ++++ |
| 3613 | 2132 | 2263 | 19 | 2142 | 10 | +++ |
| 3714 | 2132 | 2263 | 19 | 2144 | 12 | − |
| 3801 | 2132 | 2263 | 19 | 2146 | 14 | ++ |
| 3528 | 2132 | 2279 | 20 | 2140 | 8 | ++ |
| 3668 | 2132 | 2279 | 20 | 2142 | 10 | +++ |
| 3735 | 2132 | 2279 | 20 | 2144 | 12 | − |
| 3832 | 2132 | 2279 | 20 | 2146 | 14 | +++ |
| 1846 | 1732 | 1753 | 11 | 1740 | 8 | ++ |
| 1850 | 1732 | 1753 | 11 | 1742 | 10 | ++ |
| 1858 | 1732 | 1753 | 11 | 1744 | 12 | +++ |
| 1870 | 1732 | 1753 | 11 | 1746 | 14 | ++ |
| 1847 | 1732 | 1754 | 12 | 1740 | 8 | ++ |
| 1854 | 1732 | 1754 | 12 | 1742 | 10 | ++ |
| 1866 | 1732 | 1754 | 12 | 1744 | 12 | ++++ |
| 1877 | 1732 | 1754 | 12 | 1746 | 14 | ++ |
| 1849 | 1732 | 1755 | 13 | 1740 | 8 | +++ |
| 1860 | 1732 | 1755 | 13 | 1742 | 10 | +++ |
| 1867 | 1732 | 1755 | 13 | 1744 | 12 | +++ |
| 1881 | 1732 | 1755 | 13 | 1746 | 14 | ++ |
| 1853 | 1732 | 1756 | 14 | 1740 | 8 | +++ |
| 1861 | 1732 | 1756 | 14 | 1742 | 10 | ++ |
| 1879 | 1732 | 1756 | 14 | 1744 | 12 | ++ |
| 1889 | 1732 | 1756 | 14 | 1746 | 14 | ++ |
| 1859 | 1732 | 1757 | 15 | 1740 | 8 | +++ |
| 1868 | 1732 | 1757 | 15 | 1742 | 10 | +++ |
| 1880 | 1732 | 1757 | 15 | 1744 | 12 | ++ |
| 1898 | 1732 | 1757 | 15 | 1746 | 14 | ++ |
| 1863 | 1732 | 1758 | 16 | 1740 | 8 | ++ |
| 1878 | 1732 | 1758 | 16 | 1742 | 10 | ++ |
| 1886 | 1732 | 1758 | 16 | 1744 | 12 | ++ |
| 1900 | 1732 | 1758 | 16 | 1746 | 14 | ++ |
| 1873 | 1732 | 1759 | 17 | 1740 | 8 | +++ |
| 1884 | 1732 | 1759 | 17 | 1742 | 10 | ++ |
| 1895 | 1732 | 1759 | 17 | 1744 | 12 | ++ |
| 1907 | 1732 | 1759 | 17 | 1746 | 14 | ++ |
| 1888 | 1732 | 1762 | 20 | 1740 | 8 | +++ |
| 1906 | 1732 | 1762 | 20 | 1742 | 10 | ++ |
| 1917 | 1732 | 1762 | 20 | 1744 | 12 | ++ |
| 1929 | 1732 | 1762 | 20 | 1746 | 14 | ++ |
| 1644 | 1533 | 1554 | 11 | 1541 | 8 | + |
| 1646 | 1533 | 1554 | 11 | 1543 | 10 | + |
| 1650 | 1533 | 1554 | 11 | 1545 | 12 | + |
| 1655 | 1533 | 1554 | 11 | 1547 | 14 | + |
| 1648 | 1533 | 1557 | 14 | 1541 | 8 | + |
| 1653 | 1533 | 1557 | 14 | 1543 | 10 | + |
| 1660 | 1533 | 1557 | 14 | 1545 | 12 | + |
| 1666 | 1533 | 1557 | 14 | 1547 | 14 | + |
| 1651 | 1533 | 1558 | 15 | 1541 | 8 | + |
| 1657 | 1533 | 1558 | 15 | 1543 | 10 | + |
| 1663 | 1533 | 1558 | 15 | 1545 | 12 | ++ |
| 1674 | 1533 | 1558 | 15 | 1547 | 14 | ++ |
| 1658 | 1533 | 1561 | 18 | 1541 | 8 | + |
| 1667 | 1533 | 1561 | 18 | 1543 | 10 | ++ |
| 1677 | 1533 | 1561 | 18 | 1545 | 12 | ++ |
| 1693 | 1533 | 1561 | 18 | 1547 | 14 | ++ |
| 1664 | 1533 | 1562 | 19 | 1541 | 8 | + |
| 1676 | 1533 | 1562 | 19 | 1543 | 10 | + |
| 1686 | 1533 | 1562 | 19 | 1545 | 12 | ++ |
| 1698 | 1533 | 1562 | 19 | 1547 | 14 | ++ |
| 1671 | 1533 | 1563 | 20 | 1541 | 8 | + |
| 1681 | 1533 | 1563 | 20 | 1543 | 10 | + |
| 1691 | 1533 | 1563 | 20 | 1545 | 12 | ++ |
| 1699 | 1533 | 1563 | 20 | 1547 | 14 | ++ |
| 1247 | 738 | 767 | 12 | 745 | 8 | + |
| 1256 | 738 | 767 | 12 | 747 | 10 | ++ |
| 1274 | 738 | 767 | 12 | 749 | 12 | + |
| 1296 | 738 | 767 | 12 | 751 | 14 | + |
| 1263 | 738 | 785 | 15 | 745 | 8 | + |
| 1279 | 738 | 785 | 15 | 747 | 10 | + |
| 1312 | 738 | 785 | 15 | 749 | 12 | + |
| 1340 | 738 | 785 | 15 | 751 | 14 | ++ |
| 1270 | 738 | 788 | 16 | 745 | 8 | + |
| 1299 | 738 | 788 | 16 | 747 | 10 | + |
| 1320 | 738 | 788 | 16 | 749 | 12 | + |
| 1365 | 738 | 788 | 16 | 751 | 14 | ++ |
| 1305 | 738 | 802 | 19 | 745 | 8 | + |
| 1352 | 738 | 802 | 19 | 747 | 10 | + |
| 1394 | 738 | 802 | 19 | 749 | 12 | + |
| 1425 | 738 | 802 | 19 | 751 | 14 | ++ |
| 1336 | 738 | 809 | 20 | 745 | 8 | + |
| 1361 | 738 | 809 | 20 | 747 | 10 | ++ |
| 1412 | 738 | 809 | 20 | 749 | 12 | + |
| 1446 | 738 | 809 | 20 | 751 | 14 | ++ |
| 1248 | 738 | 770 *80 | 12 | 745 | 8 | + |
| 1255 | 738 | 770 *80 | 12 | 747 | 10 | ++ |
| 1272 | 738 | 770 *80 | 12 | 749 | 12 | + |
| 1291 | 738 | 770 *80 | 12 | 751 | 14 | + |
| 1259 | 738 | 782 *80 | 15 | 745 | 8 | + |
| 1288 | 738 | 782 *80 | 15 | 747 | 10 | + |
| 1309 | 738 | 782 *80 | 15 | 749 | 12 | + |
| 1348 | 738 | 782 *80 | 15 | 751 | 14 | ++ |
| 1276 | 738 | 791 *80 | 16 | 745 | 8 | + |
| 1297 | 738 | 791 *80 | 16 | 747 | 10 | + |
| 1327 | 738 | 791 *80 | 16 | 749 | 12 | + |
| 1363 | 738 | 791 *80 | 16 | 751 | 14 | ++ |
| 1302 | 738 | 805 *80 | 19 | 745 | 8 | + |
| 1345 | 738 | 805 *80 | 19 | 747 | 10 | ++ |
| 1377 | 738 | 805 *80 | 19 | 749 | 12 | + |
| 1424 | 738 | 805 *80 | 19 | 751 | 14 | ++ |
| 1323 | 738 | 807 *80 | 20 | 745 | 8 | ++ |
| 1358 | 738 | 807 *80 | 20 | 747 | 10 | ++ |
| 1399 | 738 | 807 *80 | 20 | 749 | 12 | ++ |
| 1440 | 738 | 807 *80 | 20 | 751 | 14 | ++ |
| 1250 | 738 | 769 *81 | 12 | 746 | 9 | ++ |
| 1258 | 738 | 769 *81 | 12 | 748 | 11 | + |
| 1277 | 738 | 769 *81 | 12 | 750 | 13 | ++ |
| 1267 | 738 | 784 *81 | 15 | 746 | 9 | + |
| 1298 | 738 | 784 *81 | 15 | 748 | 11 | + |
| 1326 | 738 | 784 *81 | 15 | 750 | 13 | + |
| 1282 | 738 | 789 *81 | 16 | 746 | 9 | + |
| 1310 | 738 | 789 *81 | 16 | 748 | 11 | + |
| 1354 | 738 | 789 *81 | 16 | 750 | 13 | ++ |
| 1330 | 738 | 803 *81 | 19 | 746 | 9 | + |
| 1362 | 738 | 803 *81 | 19 | 748 | 11 | + |
| 1407 | 738 | 803 *81 | 19 | 750 | 13 | + |
| 1353 | 738 | 810 *81 | 20 | 746 | 9 | + |
| 1393 | 738 | 810 *81 | 20 | 748 | 11 | + |
| 1427 | 738 | 810 *81 | 20 | 750 | 13 | + |
| 1246 | 738 | 771 *82 | 12 | 745 | 8 | + |
| 1253 | 738 | 771 *82 | 12 | 747 | 10 | + |
| 1265 | 738 | 771 *82 | 12 | 749 | 12 | + |
| 1293 | 738 | 771 *82 | 12 | 751 | 14 | + |
| 1261 | 738 | 783 *82 | 15 | 745 | 8 | + |
| 1286 | 738 | 783 *82 | 15 | 747 | 10 | + |
| 1307 | 738 | 783 *82 | 15 | 749 | 12 | ++ |
| 1338 | 738 | 783 *82 | 15 | 751 | 14 | + |
| 1268 | 738 | 790 *82 | 16 | 745 | 8 | + |
| 1292 | 738 | 790 *82 | 16 | 747 | 10 | + |
| 1321 | 738 | 790 *82 | 16 | 749 | 12 | + |
| 1357 | 738 | 790 *82 | 16 | 751 | 14 | ++ |
| 1301 | 738 | 804 *82 | 19 | 745 | 8 | + |
| 1347 | 738 | 804 *82 | 19 | 747 | 10 | + |
| 1388 | 738 | 804 *82 | 19 | 749 | 12 | + |
| 1433 | 738 | 804 *82 | 19 | 751 | 14 | + |
| 1325 | 738 | 808 *82 | 20 | 745 | 8 | + |
| 1360 | 738 | 808 *82 | 20 | 747 | 10 | ++ |
| 1397 | 738 | 808 *82 | 20 | 749 | 12 | + |
| 1447 | 738 | 808 *82 | 20 | 751 | 14 | + |

¹Indicated PEgRNA sequence does not contain the adaptations for transcription from a DNA template used experimentally (i.e., addition of a 5′G if the spacer did not already start with a G and addition of 1-6 3′U from the U6 transcription termination sequence).

TABLE 97
Average Percent Edit by Spacer in PE2 Screen
at R778L mutation site in HEK293T cells

| Spacer | Avg. % |
|---|---|
| SEQ ID NO: | Edit¹ |
| 2132 | +++ |
| 1732 | ++ |
| 1533 | + |
| 738 | + |

¹+ = 0.02%-0.30%; ++ = 0.30%-5.30%; +++ = 5.30%-15.96%; ++++ = 15.96%-27.71%.

[0658] Of the four spacers tested in this PE2 screen, PEgRNA incorporating Spacer 1 produced the highest average Prime Editing frequency. Spacer 1 was also the among the best performing of the four spacers in the Cas9 cutting assay of Example 2. PEgRNA incorporating Spacer 2 produced the next highest average Prime Editing frequency, even though Spacer 2 performed worse than Spacers 3 and 4 in the Cas9 cutting assay. Spacer 3 was the best performing spacer of the four in the Cas9 cutting assay, yielding a % indel rate almost 2 times that of Spacer 4. However, PEgRNAs incorporating Spacer 3 and Spacer 4 had, on average, low activity in the PE2 screen.

[0659] A subset of the PEgRNAs from Table 96 were further examined for indels, the results of which are shown in Table 98. Indel frequency was quantified using standard quantification techniques via CRISPResso2 algorithm as described in Clement, K. et al., Nat. Biotechnol. 37, 224-226 (2019), with the quantification window defined as at least 20 bases 5′ and 3′ of pegRNA and ngRNA nick site.

TABLE 98
PE2 screen at the R778 mutation site in HEK293T cells

| PEgRNA¹ | Spacer | RTT² | | PBS | | | |
|---|---|---|---|---|---|---|---|
| Sequence | Sequence | Sequence | RTT | Sequence | PBS | % | % |
| Number | Number | Number | Length | Number | Length | Edit³ | Indel³ |
| 1879 | 1732 | 1756 | 14 | 1744 | 12 | +++ | + |
| 3455 | 2132 | 2229 *61 | 16 | 2142 | 10 | ++++ | + |
| 3462 | 2132 | 2233 *63 | 16 | 2142 | 10 | ++++ | + |
| 3509 | 2132 | 2245 *57 | 17 | 2142 | 10 | ++++ | + |
| 3479 | 2132 | 2240 *58 | 17 | 2142 | 10 | ++++ | ++ |
| 3472 | 2132 | 2204 *59 | 14 | 2144 | 12 | +++ | ++ |
| 3575 | 2132 | 2224 *60 | 16 | 2144 | 12 | +++ | ++ |
| 3621 | 2132 | 2245 *57 | 17 | 2144 | 12 | ++++ | ++ |
| 3604 | 2132 | 2240 *58 | 17 | 2144 | 12 | ++++ | ++ |
| 3738 | 2132 | 2282 *57 | 20 | 2144 | 12 | ++++ | + |
| 3574 | 2132 | 2202 *61 | 14 | 2146 | 14 | +++ | ++ |
| 3710 | 2132 | 2236 *61 | 17 | 2146 | 14 | +++ | + |
| 3776 | 2132 | 2262 *62 | 19 | 2146 | 14 | +++ | ++ |
| 3811 | 2132 | 2265 *63 | 19 | 2146 | 14 | +++ | + |
| 3854 | 2132 | 2277 *58 | 20 | 2146 | 14 | ++++ | ++ |
| 3841 | 2132 | 2274 *63 | 20 | 2146 | 14 | ++++ | + |
| 3520 | 2132 | 2263 | 19 | 2140 | 8 | +++ | ++ |
| 3494 | 2132 | 2271 *59 | 19 | 2140 | 8 | +++ | + |

¹Indicated PEgRNA sequence does not contain the adaptations for transcription from a DNA template used experimentally (i.e., addition of a 5′G if the spacer did not already start with a G and addition of 1-6 3′U from the U6 transcription termination sequence).
²*## = RTT encodes a PAM silencing mutation (see table 85).
³+= 0.20%-0.27%; ++ = 0.27%-4.47%; +++ = 4.47%-21.95%; ++++ = 21.95%-27.70%

### Example 4—Prime Editing at the Endogenous ATP7B R778L Mutation Site in HEK293T Cells Using a PE3 System

[0660] An ATP71B R778L mutation was installed at the endogenous ATP7B locus in HEK 293T cells by prime editing and single-cell clones were obtained via limiting dilution and clonal expansion. A PE3 screen measuring correction and indel formation was performed at the endogenous ATP7B R778L locus. The HEK293T cells were transfected with DNA encoding a prime editor, PEgRNA, and ngRNA, as described in Example 1.

[0661] The results of the PE3 screen are provided in Tables 99a-99d. Below each of Tables 99a-99d is a table summarizing the PEgRNAs used experimentally (Tables 100a-100d). Each of the PEgRNA were tested in combination with multiple ngRNA. Some of the ngRNA were designed for a PE3B3 strategy and contain spacers complementary to the portion of the edit strand containing the edit. These results demonstrate the successful correction of the R778L mutation at the endogenous ATP7B locus in mammalian cells using both PE3 and PE3B Prime Editing systems

TABLE 99a
PE3 screen at the R778L mutation site in HEK293T cells

| | | PEgRNA³ SEQ ID NO: | | | | | | | | | |
|---|---|---|---|---|---|---|---|---|---|---|---|
| | | 1879 | | 3455 | | 3462 | | 3509 | | 3479 | |
| | | % | % | % | % | % | % | % | % | % | % |
| | | Edit¹ | indel¹ | Edit¹ | indel¹ | Edit¹ | indel¹ | Edit¹ | indel¹ | Edit¹ | indel¹ |
| ngRNA | PE2 | +++ | + | +++ | + | + | + | ++ | + | ++++ | + |
| spacer^{2,3} | 1997 | +++ | + | +++ | +++ | ++ | ++ | ++ | ++ | ++++ | +++ |
| SEQ ID NO: | 1990 | +++ | + | ++ | ++ | + | ++ | + | ++ | +++ | +++ |
| | * | +++ | ++ | +++ | ++ | + | + | + | + | +++ | +++ |
| | ** | +++ | + | +++ | + | + | + | +++ | + | ++++ | + |
| | *** | +++ | + | +++ | + | + | + | +++ | + | ++++ | + |
| | 2057 | +++ | ++ | +++ | + | + | + | ++ | + | ++++ | + |
| | 2056 | +++ | ++ | + | + | + | ++ | +++ | ++ | ++++ | ++ |
| | 3268 | +++ | ++ | +++ | + | ++ | + | +++ | + | ++++ | ++ |
| | 3269 | +++ | ++ | +++ | ++ | ++ | ++ | +++ | ++ | ++++ | ++ |
| | 3260 | +++ | ++ | ++++ | ++ | ++ | ++ | +++ | + | ++++ | ++ |
| | 3279 | ++ | ++ | ++++ | ++ | ++ | ++ | +++ | ++ | ++++ | ++ |
| | 3244 | +++ | ++ | ++++ | ++ | ++ | ++ | +++ | + | ++++ | ++ |
| | 3275 | ++ | ++ | +++ | + | + | + | ++ | + | ++++ | + |
| | 63 | +++ | ++ | +++ | + | + | + | ++ | + | ++++ | + |

¹+ = 0.12%-0.41%; ++ = 0.41%-3.33%; +++ = 3.33%-18.73%; +++ = 18.73%-45.64%.
²PE3bngRNA spacer used and matched to PAM silencing edit encoded by RTT (if any).
* = ngRNA spacer is sequence number: 2003; 3255 *57; 3265 *58; 3253 *59; 3252 *62; 3254 *60; 3251 *61; or 3256 *63.
** = ngRNA spacer is sequence number: 2000; 3271 *57; 3264 *58; 3297 *59; 3286 *62; 3294 *60; 3274 *61; or 3281 *63.
*** = ngRNA spacer is sequence number: 1994; 3272 *57; 3299 *58; 3247 *59; 3288 *62; 3258 *60; 3249 *61; 3267 *63

TABLE 100a
Summary of PEgRNA used

| PEgRNA² | Spacer | RTT⁴ | | PBS | |
|---|---|---|---|---|---|
| SEQ | SEQ | SEQ | RTT | SEQ | PBS |
| ID NO: | ID NO: | ID NO: | Length | ID NO: | Length |
| 1879 | 1732 | 1756 | 14 | 1744 | 12 |
| 3455 | 2132 | 2229 *61 | 16 | 2142 | 10 |
| 3462 | 2132 | 2233 *63 | 16 | 2142 | 10 |
| 3509 | 2132 | 2245 *57 | 17 | 2142 | 10 |
| 3479 | 2132 | 2240 *58 | 17 | 2142 | 10 |

3. Indicated sequence does not contain the transcription adaptations used experimentally (i.e., addition of a 5′G if the spacer did not already start with a G and addition of 1-6 3′U from the U6 transcription termination sequence). In case of ngRNA, the indicated spacer was combined with the same gRNA core used in the PEgRNA.
⁴*## = RTT encodes a PAM silencing mutation (see table 85).

TABLE 99b
PE3 screen at the R778L mutation site in HEK293T cells

| | | PEgRNA³ SEQ ID NO: | | | | | | | | | |
|---|---|---|---|---|---|---|---|---|---|---|---|
| | | 3472 | | 3575 | | 3621 | | 3604 | | 3738 | |
| | | % | % | % | % | % | % | % | % | % | % |
| | | Edit¹ | indel¹ | Edit¹ | indel¹ | Edit¹ | indel¹ | Edit¹ | indel¹ | Edit¹ | indel¹ |
| ngRNA | PE2 | ++++ | + | +++ | + | ++++ | + | +++ | ++ | ++++ | + |
| spacer^{2,3} | 1997 | ++++ | +++ | +++ | +++ | ++++ | +++ | +++ | +++ | ++++ | +++ |
| SEQ | 1990 | +++ | +++ | +++ | ++ | ++++ | +++ | ++ | +++ | +++ | +++ |
| ID | * | +++ | ++ | +++ | ++ | ++++ | +++ | +++ | +++ | +++ | ++ |
| NO: | ** | +++ | + | +++ | + | ++++ | + | +++ | ++ | ++++ | + |
| | *** | ++++ | + | +++ | + | ++++ | + | +++ | ++ | ++++ | + |
| | 2057 | +++ | + | +++ | + | ++++ | + | +++ | ++ | ++++ | + |
| | 2056 | ++++ | ++ | +++ | ++ | ++++ | ++ | +++ | ++ | ++++ | + |
| | 3268 | ++++ | ++ | ++++ | ++ | ++++ | ++ | ++++ | ++ | ++++ | + |
| | 3269 | ++++ | ++ | ++++ | ++ | ++++ | ++ | ++++ | ++ | ++++ | ++ |
| | 3260 | ++++ | ++ | ++++ | ++ | ++++ | ++ | ++++ | +++ | ++++ | ++ |
| | 3279 | ++++ | ++ | ++++ | ++ | ++++ | ++ | ++++ | +++ | ++++ | ++ |
| | 3244 | ++++ | ++ | ++++ | ++ | ++++ | ++ | ++++ | +++ | ++++ | ++ |
| | 3275 | ++++ | + | +++ | + | ++++ | + | +++ | ++ | ++++ | + |
| | 63 | +++ | + | +++ | + | ++++ | + | +++ | ++ | ++++ | + |

¹+= 0.12%-0.41%; ++ = 0.41%-3.33%; ++ + = 3.33%-18.73%; +++ = 18.73%-45.64%.
²PE3b ngRNA spacer used and matched to PAM silencing edit encoded by RTT (if any).
* = ngRNA spacer is sequence number: 2003; 3255 *57; 3265 *58; 3253 *59; 3252 *62; 3254 *60; 3251 *61; or 3256 *63.
** = ngRNA spacer is sequence number: 2000; 3271 *57; 3264 *58; 3297 *59; 3286 *62; 3294 *60; 3274 *61; or 3281 *63.
*** = ngRNA spacer is sequence number: 1994; 3272 *57; 3299 *58; 3247 *59; 3288 *62; 3258 *60; 3249 *61; 3267 *63

TABLE 100b
Summary of PEgRNA used:

| PEgRNA² | Spacer | RTT⁴ | | PBS | |
|---|---|---|---|---|---|
| SEQ | SEQ | SEQ | RTT | SEQ | PBS |
| ID NO: | ID NO: | ID NO: | Length | ID NO: | Length |
| 3472 | 2132 | 2204 *59 | 14 | 2144 | 12 |
| 3575 | 2132 | 2224 *60 | 16 | 2144 | 12 |
| 3621 | 2132 | 2245 *57 | 17 | 2144 | 12 |
| 3604 | 2132 | 2240 *58 | 17 | 2144 | 12 |
| 3738 | 2132 | 2282 *57 | 20 | 2144 | 12 |

3. Indicated sequence does not contain the transcription adaptations used experimentally (i.e., addition of a 5′G if the spacer did not already start with a G and addition of 1-6 3′U from the U6 transcription termination sequence). In case of ngRNA, the indicated spacer was combined with the same gRNA core used in the PEgRNA.
⁴*## = RTT encodes a PAM silencing mutation (see table 85).

TABLE 99c
PE3 screen at the R778L mutation site in HEK293T cells

| | | PEgRNA³ SEQ ID NO: | | | | | | | | | |
|---|---|---|---|---|---|---|---|---|---|---|---|
| | | 3574 | | 3710 | | 3776 | | 3811 | | 3854 | |
| | | % | % | % | % | % | % | % | % | % | % |
| | | Edit¹ | indel¹ | Edit¹ | indel¹ | Edit¹ | indel¹ | Edit¹ | indel¹ | Edit¹ | indel¹ |
| ngRNA | PE2 | +++ | + | +++ | + | ++++ | + | ++++ | + | +++ | + |
| spacer^{2,3} | 1997 | +++ | +++ | +++ | +++ | ++++ | +++ | +++ | +++ | ++++ | +++ |
| SEQ | 1990 | +++ | +++ | +++ | ++ | ++++ | +++ | +++ | +++ | +++ | ++ |
| ID | * | +++ | ++ | +++ | ++ | ++++ | ++ | ++++ | ++ | ++++ | + |
| NO: | ** | +++ | + | +++ | + | ++++ | + | ++++ | + | ++++ | + |
| | *** | +++ | + | ++++ | + | ++++ | + | ++++ | + | ++++ | + |
| | 2057 | +++ | + | +++ | + | ++++ | + | ++++ | + | ++++ | + |
| | 2056 | +++ | ++ | +++ | + | ++++ | ++ | +++ | ++ | ++++ | ++ |
| | 3268 | ++++ | + | ++++ | + | ++++ | ++ | ++++ | + | ++++ | + |
| | 3269 | ++++ | ++ | ++++ | + | ++++ | ++ | ++++ | ++ | ++++ | ++ |
| | 3260 | ++++ | ++ | ++++ | ++ | +++ | ++ | ++++ | ++ | ++++ | ++ |
| | 3279 | ++++ | ++ | ++++ | ++ | ++++ | ++ | ++++ | ++ | ++++ | ++ |
| | 3244 | ++++ | ++ | ++++ | ++ | ++++ | ++ | ++++ | ++ | ++++ | ++ |
| | 3275 | +++ | + | +++ | + | +++ | + | ++++ | + | ++++ | + |
| | 63 | +++ | + | +++ | + | ++++ | + | ++++ | + | ++++ | + |

¹.+ = 0.12%-0.41%; ++ = 0.41%-3.33%; +++ = 3.33%-18.73%; +++ = 18.73%-45.64%.
²PE3b ngRNA spacer used and matched to PAM silencing edit encoded by RTT (if any).
* = ngRNA spacer is sequence number: 2003, 3255 *57; 3265 *58; 3253 *59; 3252 *62; 3254 *60; 3251 *61; or 3256 *63.
** = ngRNA spacer is sequence number: 2000; 3271 *57; 3264 *58; 3297 *59; 3286 *62; 3294 *60; 3274 *61; or 3281 *63.
*** = ngRNA spacer is sequence number: 1994; 3272 *57; 3299 *58; 3247 *59; 3288 *60; 3249 *61; 3267 *63.

TABLE 100c
Summary of PEgRNA used:

| PEgRNA² | Spacer | RTT⁴ | | PBS | |
|---|---|---|---|---|---|
| SEQ | SEQ | SEQ | RTT | SEQ | PBS |
| ID NO: | ID NO: | ID NO: | Length | ID NO: | Length |
| 3574 | 2132 | 2202 *61 | 14 | 2146 | 14 |
| 3710 | 2132 | 2236 *61 | 17 | 2146 | 14 |
| 3776 | 2132 | 2262 *62 | 19 | 2146 | 14 |
| 3811 | 2132 | 2265 *63 | 19 | 2146 | 14 |
| 3854 | 2132 | 2277 *58 | 20 | 2146 | 14 |

3. Indicated sequence does not contain the transcription adaptations used experimentally (i.e., addition of a 5′G if the spacer did not already start with a G and addition of 1-6 3′U from the U6 transcription termination sequence). In case of ngRNA, the indicated spacer was combined with the same gRNA core used in the PEgRNA.
⁴*## = RTT encodes a PAM silencing mutation (see table 85).

TABLE 99d
PE3 screen at the R778L mutation site in HEK293T cells

| | | PEgRNA³ SEQ ID NO: | | | | | |
|---|---|---|---|---|---|---|---|
| | | 3841 | | 3520 | | 3494 | |
| | | % | % | % | % | % | % |
| | | Edit¹ | indel¹ | Edit¹ | indel¹ | Edit¹ | indel¹ |
| ngRNA spacer^{2,3} | PE2 | ++++ | + | +++ | + | +++ | + |
| SEQ ID NO: | 1997 | +++ | +++ | +++ | +++ | | |
| | 1990 | +++ | ++ | +++ | +++ | | |
| | * | +++ | ++ | +++ | ++ | ++++ | + |
| | ** | +++ | + | ++++ | + | ++++ | + |
| | *** | ++++ | + | ++++ | + | ++++ | + |
| | 2057 | +++ | + | +++ | + | ++++ | + |
| | 2056 | +++ | ++ | +++ | ++ | ++++ | + |
| | 3268 | ++++ | + | +++ | + | | |
| | 3269 | ++++ | ++ | ++++ | ++ | | |
| | 3260 | ++++ | ++ | ++++ | ++ | | |
| | 3279 | ++++ | ++ | ++++ | ++ | | |
| | 3244 | ++++ | ++ | ++++ | ++ | | |
| | 3275 | ++++ | + | | | | |
| | 63 | ++++ | + | | | | |

¹+ = 0.12%-0.41%; ++ = 0.41%-3.33%; +++ = 3.33%-18.73%; +++ = 18.73%-45.64%.
²PE3b ngRNA spacer used and matched to PAM silencing edit encoded by RTT (if any).
* = ngRNA spacer is sequence number: 2003; 3255 *57; 3265 *58; 3253 *59; 3252 *62; 3254 *60; 3251 *61; or 3256 *63.
** = ngRNA spacer is sequence number: 2000; 3271 *57; 3264 *58; 3297 *59; 3286 *62; 3294 *60; 3274 *61; or 3281 *63.
*** = ngRNA spacer is sequence number: 1994; 3272 *57; 3299 *58; 3247 *59; 3288 *62; 3258 *60; 3249 *61; 3267 *63

TABLE 100d
Summary of PEgRNA used:

| PERNA² | Spacer | RTT⁴ | | PBS | |
|---|---|---|---|---|---|
| SEQ | SEQ | SEQ | RTT | SEQ | PBS |
| ID NO: | ID NO: | ID NO: | Length | ID NO: | Length |
| 3574 | 2132 | 2202 *61 | 14 | 2146 | 14 |
| 3710 | 2132 | 2236 *61 | 17 | 2146 | 14 |
| 3776 | 2132 | 2262 *62 | 19 | 2146 | 14 |
| 3811 | 2132 | 2265 *63 | 19 | 2146 | 14 |
| 3854 | 2132 | 2277 *58 | 20 | 2146 | 14 |

3. Indicated sequence does not contain the transcription adaptations used experimentally (i.e., addition of a 5′G if the spacer did not already start with a G and addition of 1-6 3′U from the U6 transcription termination sequence). In case of ngRNA, the indicated spacer was combined with the same gRNA core used in the PEgRNA.
⁴*## = RTT encodes a PAM silencing mutation (see table 85).

### Example 5—Prime Editing at the Endogenous ATP7B R778L Mutation Site in Mammalian Cells Using Synthetic PEgRNA in a PE2 System

[0662] An ATP71B R778L mutation was installed at the endogenous ATP71B locus in HEK293T by prime editing and single-cell clones were obtained via limiting dilution and clonal expansion, as described in Example 1. A PE2 screen measuring percent correction was performed at the endogenous ATP71B R778L locus. The cells were transfected with mRNA encoding a prime editor, and synthetic PEgRNA, as described in Example 1.

[0663] The results of the PE2 screen for the HEK293T cells are provided in Table 101. These data demonstrate successful Prime Editing at the endogenous ATP71B R778L mutation site using synthetic PEgRNA. Successful editing was observed with PEgRNAs containing multiple PBS lengths, multiple RTT lengths, and both with and without PAM silencing mutations. The percent editing observed for all PEgRNA having the same spacer were averaged, and the results reported in Table 102.

TABLE 101
PE2 screen at R778L mutation site in mammalian
cell culture using synthetic PEgRNAs

| PEgRNA¹ | Spacer | RTT² | | PBS | | | |
|---|---|---|---|---|---|---|---|
| SEQ ID | SEQ | SEQ ID | RTT | SEQ | PBS | % | % |
| NO: | ID NO: | NO: | Length | ID NO: | Length | Edit³ | Indel³ |
| 3300 | 2132 | 2155 *57 | 10 | 2140 | 8 | +++ | + |
| 3319 | 2132 | 2155 *57 | 10 | 2142 | 10 | +++ | + |
| 3337 | 2132 | 2155 *57 | 10 | 2144 | 12 | ++++ | + |
| 3380 | 2132 | 2155 *57 | 10 | 2146 | 14 | + | + |
| 3333 | 2132 | 2211 *57 | 14 | 2140 | 8 | ++++ | ++ |
| 3398 | 2132 | 2211 *57 | 14 | 2142 | 10 | ++++ | + |
| 3454 | 2132 | 2211 *57 | 14 | 2144 | 12 | ++++ | ++ |
| 3545 | 2132 | 2211 *57 | 14 | 2146 | 14 | ++++ | ++ |
| 3354 | 2132 | 2216 *57 | 15 | 2140 | 8 | ++++ | ++ |
| 2413 | 2132 | 2216 *57 | 15 | 2142 | 10 | ++++ | + |
| 3496 | 2132 | 2216 *57 | 15 | 2144 | 12 | ++++ | ++ |
| 3592 | 2132 | 2216 *57 | 15 | 2146 | 14 | ++++ | + |
| 3390 | 2132 | 2227 *57 | 16 | 2140 | 8 | ++++ | +++ |
| 3450 | 2132 | 2227 *57 | 16 | 2142 | 10 | ++++ | ++ |
| 3532 | 2132 | 2227 *57 | 16 | 2144 | 12 | ++++ | + |
| 3638 | 2132 | 2227 *57 | 16 | 2146 | 14 | ++++ | ++ |
| 3410 | 2132 | 2245 *57 | 17 | 2140 | 8 | ++++ | ++ |
| 3509 | 2132 | 2245 *57 | 17 | 2142 | 10 | ++++ | +++ |
| 3621 | 2132 | 2245 *57 | 17 | 2144 | 12 | ++++ | ++ |
| 3680 | 2132 | 2245 *57 | 17 | 2146 | 14 | ++++ | ++ |
| 3495 | 2132 | 2260 *57 | 19 | 2140 | 8 | ++++ | ++ |
| 3620 | 2132 | 2260 *57 | 19 | 2142 | 10 | + | + |
| 3677 | 2132 | 2260 *57 | 19 | 2144 | 12 | ++++ | ++ |
| 3815 | 2132 | 2260 *57 | 19 | 2146 | 14 | ++++ | ++ |
| 3536 | 2132 | 2282 *57 | 20 | 2140 | 8 | ++++ | ++ |
| 3636 | 2132 | 2282 *57 | 20 | 2142 | 10 | + | + |
| 3738 | 2132 | 2282 *57 | 20 | 2144 | 12 | ++++ | ++ |
| 3855 | 2132 | 2282 *57 | 20 | 2146 | 14 | +++ | + |
| 3305 | 2132 | 2159 *58 | 10 | 2140 | 8 | ++ | + |
| 3323 | 2132 | 2159 *58 | 10 | 2142 | 10 | ++ | + |
| 3339 | 2132 | 2159 *58 | 10 | 2144 | 12 | +++ | + |
| 3399 | 2132 | 2159 *58 | 10 | 2146 | 14 | + | + |
| 3341 | 2132 | 2201 *58 | 14 | 2140 | 8 | ++++ | ++ |
| 3385 | 2132 | 2201 *58 | 14 | 2142 | 10 | ++++ | ++ |
| 3449 | 2132 | 2201 *58 | 14 | 2144 | 12 | ++++ | + |
| 3539 | 2132 | 2201 *58 | 14 | 2146 | 14 | ++++ | ++ |
| 3365 | 2132 | 2215 *58 | 15 | 2140 | 8 | ++++ | ++ |
| 3426 | 2132 | 2215 *58 | 15 | 2142 | 10 | + | + |
| 3506 | 2132 | 2215 *58 | 15 | 2144 | 12 | ++++ | + |
| 3618 | 2132 | 2215 *58 | 15 | 2146 | 14 | + | + |
| 3373 | 2132 | 2235 *58 | 16 | 2140 | 8 | ++++ | ++ |
| 3437 | 2132 | 2235 *58 | 16 | 2142 | 10 | ++++ | ++ |
| 3571 | 2132 | 2235 *58 | 16 | 2144 | 12 | ++++ | + |
| 3664 | 2132 | 2235 *58 | 16 | 2146 | 14 | +++ | + |
| 3424 | 2132 | 2240 *58 | 17 | 2140 | 8 | ++++ | ++ |
| 3479 | 2132 | 2240 *58 | 17 | 2142 | 10 | ++++ | +++ |
| 3604 | 2132 | 2240 *58 | 17 | 2144 | 12 | +++ | ++ |
| 3681 | 2132 | 2240 *58 | 17 | 2146 | 14 | ++++ | + |
| 3518 | 2132 | 2269 *58 | 19 | 2140 | 8 | ++++ | ++ |
| 3600 | 2132 | 2269 *58 | 19 | 2142 | 10 | ++++ | + |
| 3717 | 2132 | 2269 *58 | 19 | 2144 | 12 | ++++ | ++ |
| 3775 | 2132 | 2269 *58 | 19 | 2146 | 14 | ++++ | ++ |
| 3572 | 2132 | 2277 *58 | 20 | 2140 | 8 | ++++ | ++ |
| 3660 | 2132 | 2277 *58 | 20 | 2142 | 10 | ++++ | ++ |
| 3768 | 2132 | 2277 *58 | 20 | 2144 | 12 | +++ | + |
| 3854 | 2132 | 2277 *58 | 20 | 2146 | 14 | ++++ | ++ |
| 3306 | 2132 | 2154 *59 | 10 | 2140 | 8 | +++ | + |
| 3318 | 2132 | 2154 *59 | 10 | 2142 | 10 | +++ | + |
| 3342 | 2132 | 2154 *59 | 10 | 2144 | 12 | ++++ | + |
| 3401 | 2132 | 2154 *59 | 10 | 2146 | 14 | +++ | + |
| 3343 | 2132 | 2204 *59 | 14 | 2140 | 8 | ++++ | ++ |
| 3388 | 2132 | 2204 *59 | 14 | 2142 | 10 | ++++ | + |
| 3472 | 2132 | 2204 *59 | 14 | 2144 | 12 | ++++ | ++ |
| 3577 | 2132 | 2204 *59 | 14 | 2146 | 14 | ++++ | ++ |
| 3358 | 2132 | 2218 *59 | 15 | 2140 | 8 | ++++ | ++ |
| 3418 | 2132 | 2218 *59 | 15 | 2142 | 10 | ++++ | ++ |
| 3492 | 2132 | 2218 *59 | 15 | 2144 | 12 | ++++ | ++ |
| 3603 | 2132 | 2218 *59 | 15 | 2146 | 14 | ++++ | ++ |
| 3376 | 2132 | 2232 *59 | 16 | 2140 | 8 | ++++ | + |
| 3446 | 2132 | 2232 *59 | 16 | 2142 | 10 | ++++ | ++ |
| 3542 | 2132 | 2232 *59 | 16 | 2144 | 12 | ++++ | ++ |
| 3628 | 2132 | 2232 *59 | 16 | 2146 | 14 | ++++ | ++ |
| 3421 | 2132 | 2242 *59 | 17 | 2140 | 8 | ++++ | ++ |
| 3511 | 2132 | 2242 *59 | 17 | 2142 | 10 | ++++ | ++ |
| 3599 | 2132 | 2242 *59 | 17 | 2144 | 12 | ++ | + |
| 3712 | 2132 | 2242 *59 | 17 | 2146 | 14 | +++ | + |
| 3494 | 2132 | 2271 *59 | 19 | 2140 | 8 | ++++ | ++ |
| 3583 | 2132 | 2271 *59 | 19 | 2142 | 10 | ++++ | ++ |
| 3713 | 2132 | 2271 *59 | 19 | 2144 | 12 | ++++ | ++ |
| 3783 | 2132 | 2271 *59 | 19 | 2146 | 14 | ++++ | ++ |
| 3560 | 2132 | 2280 *59 | 20 | 2140 | 8 | ++++ | ++ |
| 3650 | 2132 | 2280 *59 | 20 | 2142 | 10 | ++++ | +++ |
| 3742 | 2132 | 2280 *59 | 20 | 2144 | 12 | ++++ | ++ |
| 3834 | 2132 | 2280 *59 | 20 | 2146 | 14 | ++++ | ++ |
| 3304 | 2132 | 2160 *60 | 10 | 2140 | 8 | +++ | + |
| 3317 | 2132 | 2160 *60 | 10 | 2142 | 10 | +++ | + |
| 3338 | 2132 | 2160 *60 | 10 | 2144 | 12 | +++ | + |
| 3379 | 2132 | 2160 *60 | 10 | 2146 | 14 | +++ | + |
| 3340 | 2132 | 2206 *60 | 14 | 2140 | 8 | ++++ | ++ |
| 3403 | 2132 | 2206 *60 | 14 | 2142 | 10 | ++++ | ++ |
| 3457 | 2132 | 2206 *60 | 14 | 2144 | 12 | ++++ | ++ |
| 3567 | 2132 | 2206 *60 | 14 | 2146 | 14 | +++ | ++ |
| 3370 | 2132 | 2214 *60 | 15 | 2140 | 8 | ++++ | ++ |
| 3405 | 2132 | 2214 *60 | 15 | 2142 | 10 | ++++ | ++ |
| 3480 | 2132 | 2214 *60 | 15 | 2144 | 12 | +++ | ++ |
| 3619 | 2132 | 2214 *60 | 15 | 2146 | 14 | +++ | + |
| 3372 | 2132 | 2224 *60 | 16 | 2140 | 8 | ++++ | ++ |
| 3456 | 2132 | 2224 *60 | 16 | 2142 | 10 | ++++ | ++ |
| 3575 | 2132 | 2224 *60 | 16 | 2144 | 12 | + | + |
| 3643 | 2132 | 2224 *60 | 16 | 2146 | 14 | +++ | + |
| 3416 | 2132 | 2243 *60 | 17 | 2140 | 8 | ++++ | ++ |
| 3519 | 2132 | 2243 *60 | 17 | 2142 | 10 | ++++ | +++ |
| 3625 | 2132 | 2243 *60 | 17 | 2144 | 12 | ++++ | +++ |
| 3679 | 2132 | 2243 *60 | 17 | 2146 | 14 | ++++ | ++ |
| 3481 | 2132 | 2268 *60 | 19 | 2140 | 8 | ++++ | ++ |
| 3607 | 2132 | 2268 *60 | 19 | 2142 | 10 | ++++ | ++ |
| 3678 | 2132 | 2268 *60 | 19 | 2144 | 12 | ++++ | ++ |
| 3798 | 2132 | 2268 *60 | 19 | 2146 | 14 | ++++ | ++ |
| 3573 | 2132 | 2281 *60 | 20 | 2140 | 8 | ++++ | +++ |
| 3649 | 2132 | 2281 *60 | 20 | 2142 | 10 | ++++ | ++ |
| 3725 | 2132 | 2281 *60 | 20 | 2144 | 12 | ++++ | +++ |
| 3842 | 2132 | 2281 *60 | 20 | 2146 | 14 | ++++ | ++ |
| 3302 | 2132 | 2153 *61 | 10 | 2140 | 8 | + | + |
| 3316 | 2132 | 2153 *61 | 10 | 2142 | 10 | + | + |
| 3335 | 2132 | 2153 *61 | 10 | 2144 | 12 | + | + |
| 3383 | 2132 | 2153 *61 | 10 | 2146 | 14 | + | + |
| 3345 | 2132 | 2202 *61 | 14 | 2140 | 8 | +++ | + |
| 3386 | 2132 | 2202 *61 | 14 | 2142 | 10 | ++++ | ++ |
| 3441 | 2132 | 2202 *61 | 14 | 2144 | 12 | ++++ | + |
| 3574 | 2132 | 2202 *61 | 14 | 2146 | 14 | ++++ | + |
| 3376 | 2132 | 2222 *61 | 15 | 2140 | 8 | +++ | + |
| 3408 | 2132 | 2222 *61 | 15 | 2142 | 10 | ++++ | + |
| 3488 | 2132 | 2222 *61 | 15 | 2144 | 12 | +++ | + |
| 3605 | 2132 | 2222 *61 | 15 | 2146 | 14 | ++++ | ++ |
| 3394 | 2132 | 2229 *61 | 16 | 2140 | 8 | ++++ | ++ |
| 3455 | 2132 | 2229 *61 | 16 | 2142 | 10 | ++++ | ++ |
| 3559 | 2132 | 2229 *61 | 16 | 2144 | 12 | ++++ | ++ |
| 3661 | 2132 | 2229 *61 | 16 | 2146 | 14 | ++++ | ++ |
| 3432 | 2132 | 2236 *61 | 17 | 2140 | 8 | ++++ | + |
| 3523 | 2132 | 2236 *61 | 17 | 2142 | 10 | ++++ | ++ |
| 3593 | 2132 | 2236 *61 | 17 | 2144 | 12 | ++++ | ++ |
| 3710 | 2132 | 2236 *61 | 17 | 2146 | 14 | ++++ | ++ |
| 3486 | 2132 | 2264 *61 | 19 | 2140 | 8 | ++++ | ++ |
| 3595 | 2132 | 2264 *61 | 19 | 2142 | 10 | ++++ | ++ |
| 3702 | 2132 | 2264 *61 | 19 | 2144 | 12 | ++++ | ++ |
| 3795 | 2132 | 2264 *61 | 19 | 2146 | 14 | ++++ | ++ |
| 3544 | 2132 | 2276 *61 | 20 | 2140 | 8 | +++ | ++ |
| 3662 | 2132 | 2276 *61 | 20 | 2142 | 10 | ++++ | ++ |
| 3724 | 2132 | 2276 *61 | 20 | 2144 | 12 | ++++ | ++ |
| 3856 | 2132 | 2276 *61 | 20 | 2146 | 14 | ++++ | + |
| 3307 | 2132 | 2152 *62 | 10 | 2140 | 8 | +++ | + |
| 3322 | 2132 | 2152 *62 | 10 | 2142 | 10 | ++++ | + |
| 3344 | 2132 | 2152 *62 | 10 | 2144 | 12 | +++ | + |
| 3400 | 2132 | 2152 *62 | 10 | 2146 | 14 | +++ | + |
| 3346 | 2132 | 2200 *62 | 14 | 2140 | 8 | ++++ | ++ |
| 3389 | 2132 | 2200 *62 | 14 | 2142 | 10 | +++ | + |
| 3464 | 2132 | 2200 *62 | 14 | 2144 | 12 | +++ | + |
| 3579 | 2132 | 2200 *62 | 14 | 2146 | 14 | ++ | + |
| 3353 | 2132 | 2221 *62 | 15 | 2140 | 8 | ++++ | + |
| 3406 | 2132 | 2221 *62 | 15 | 2142 | 10 | ++++ | ++ |
| 3515 | 2132 | 2221 *62 | 15 | 2144 | 12 | +++ | ++ |
| 3608 | 2132 | 2221 *62 | 15 | 2146 | 14 | +++ | ++ |
| 3375 | 2132 | 2225 *62 | 16 | 2140 | 8 | ++++ | ++ |
| 3473 | 2132 | 2225 *62 | 16 | 2142 | 10 | ++++ | ++ |
| 3565 | 2132 | 2225 *62 | 12 | 2144 | 12 | ++++ | ++ |
| 3653 | 2132 | 2225 *62 | 16 | 2146 | 14 | ++++ | ++ |
| 3428 | 2132 | 2244 *62 | 17 | 2140 | 8 | ++++ | +++ |
| 3477 | 2132 | 2244 *62 | 17 | 2142 | 10 | ++++ | ++ |
| 3626 | 2132 | 2244 *62 | 17 | 2144 | 12 | ++++ | ++ |
| 3700 | 2132 | 2244 *62 | 17 | 2146 | 14 | ++++ | +++ |
| 3514 | 2132 | 2262 *62 | 19 | 2140 | 8 | ++++ | +++ |
| 3602 | 2132 | 2262 *62 | 19 | 2142 | 10 | ++++ | ++ |
| 3711 | 2132 | 2262 *62 | 19 | 2144 | 12 | ++++ | ++ |
| 3776 | 2132 | 2262 *62 | 19 | 2146 | 14 | ++++ | ++ |
| 3548 | 2132 | 2272 *62 | 20 | 2140 | 8 | ++++ | ++ |
| 3634 | 2132 | 2272 *62 | 20 | 2142 | 10 | ++++ | +++ |
| 3739 | 2132 | 2272 *62 | 20 | 2144 | 12 | ++++ | ++ |
| 3852 | 2132 | 2272 *62 | 20 | 2146 | 14 | ++++ | ++ |
| 3303 | 2132 | 2157 *63 | 10 | 2140 | 8 | +++ | + |
| 3321 | 2132 | 2157 *63 | 10 | 2142 | 10 | +++ | + |
| 3336 | 2132 | 2157 *63 | 10 | 2144 | 12 | +++ | + |
| 3374 | 2132 | 2157 *63 | 10 | 2146 | 14 | +++ | + |
| 3384 | 2132 | 2205 *63 | 14 | 2142 | 10 | ++++ | +++ |
| 3448 | 2132 | 2205 *63 | 14 | 2144 | 12 | ++++ | ++ |
| 3543 | 2132 | 2205 *63 | 14 | 2146 | 14 | ++++ | +++ |
| 3357 | 2132 | 2212 *63 | 15 | 2140 | 8 | ++++ | ++ |
| 3431 | 2132 | 2212 *63 | 15 | 2142 | 10 | ++++ | ++ |
| 3504 | 2132 | 2212 *63 | 15 | 2144 | 12 | ++++ | ++ |
| 3597 | 2132 | 2212 *63 | 15 | 2146 | 14 | ++++ | +++ |
| 3381 | 2132 | 2233 *63 | 16 | 2140 | 8 | ++++ | ++ |
| 3462 | 2132 | 2233 *63 | 16 | 2142 | 10 | ++++ | +++ |
| 3527 | 2132 | 2233 *63 | 16 | 2144 | 12 | ++++ | ++ |
| 3663 | 2132 | 2233 *63 | 16 | 2146 | 14 | ++++ | + |
| 3434 | 2132 | 2237 *63 | 17 | 2140 | 8 | ++++ | ++ |
| 3485 | 2132 | 2237 *63 | 17 | 2142 | 10 | ++++ | +++ |
| 3609 | 2132 | 2237 *63 | 17 | 2144 | 12 | ++++ | ++ |
| 3682 | 2132 | 2237 *63 | 17 | 2146 | 14 | ++++ | ++ |
| 3500 | 2132 | 2265 *63 | 19 | 2140 | 8 | ++++ | +++ |
| 3612 | 2132 | 2265 *63 | 19 | 2142 | 10 | ++++ | ++ |
| 3703 | 2132 | 2265 *63 | 19 | 2144 | 12 | ++++ | ++ |
| 3811 | 2132 | 2265 *63 | 19 | 2146 | 14 | ++++ | ++ |
| 3531 | 2132 | 2274 *63 | 20 | 2140 | 8 | ++++ | +++ |
| 3640 | 2132 | 2274 *63 | 20 | 2142 | 10 | ++++ | +++ |
| 3745 | 2132 | 2274 *63 | 20 | 2144 | 12 | ++++ | ++ |
| 3841 | 2132 | 2274 *63 | 20 | 2146 | 14 | ++++ | ++ |
| 3301 | 2132 | 2162 | 10 | 2140 | 8 | ++++ | + |
| 3320 | 2132 | 2162 | 10 | 2142 | 10 | ++++ | + |
| 3332 | 2132 | 2162 | 10 | 2144 | 12 | +++ | + |
| 3392 | 2132 | 2162 | 10 | 2146 | 14 | +++ | + |
| 3334 | 2132 | 2209 | 14 | 2140 | 8 | +++ | ++ |
| 3396 | 2132 | 2209 | 14 | 2142 | 10 | +++ | ++ |
| 3461 | 2132 | 2209 | 14 | 2144 | 12 | +++ | + |
| 3524 | 2132 | 2209 | 14 | 2146 | 14 | +++ | ++ |
| 3362 | 2132 | 2223 | 15 | 2140 | 8 | +++ | ++ |
| 3435 | 2132 | 2223 | 15 | 2142 | 10 | +++ | ++ |
| 3491 | 2132 | 2223 | 15 | 2144 | 12 | +++ | + |
| 3596 | 2132 | 2223 | 15 | 2146 | 14 | +++ | ++ |
| 3393 | 2132 | 2226 | 16 | 2140 | 8 | +++ | ++ |
| 3442 | 2132 | 2226 | 16 | 2142 | 10 | +++ | ++ |
| 3537 | 2132 | 2226 | 16 | 2144 | 12 | +++ | ++ |
| 3657 | 2132 | 2226 | 16 | 2146 | 14 | +++ | ++ |
| 3429 | 2132 | 2238 | 17 | 2140 | 8 | +++ | ++ |
| 3499 | 2132 | 2238 | 17 | 2142 | 10 | +++ | ++ |
| 3624 | 2132 | 2238 | 17 | 2144 | 12 | +++ | + |
| 3687 | 2132 | 2238 | 17 | 2146 | 14 | +++ | ++ |
| 3520 | 2132 | 2263 | 19 | 2140 | 8 | +++ | ++ |
| 3613 | 2132 | 2263 | 19 | 2142 | 10 | +++ | ++ |
| 3714 | 2132 | 2263 | 19 | 2144 | 12 | +++ | + |
| 3801 | 2132 | 2263 | 19 | 2146 | 14 | +++ | ++ |
| 3528 | 2132 | 2279 | 20 | 2140 | 8 | +++ | ++ |
| 3668 | 2132 | 2279 | 20 | 2142 | 10 | +++ | ++ |
| 3735 | 2132 | 2279 | 20 | 2144 | 12 | +++ | + |
| 3832 | 2132 | 2279 | 20 | 2146 | 14 | +++ | ++ |
| 1846 | 1732 | 1753 | 11 | 1740 | 8 | +++ | +++ |
| 1850 | 1732 | 1753 | 11 | 1742 | 10 | +++ | +++ |
| 1858 | 1732 | 1753 | 11 | 1744 | 12 | +++ | +++ |
| 1870 | 1732 | 1753 | 11 | 1746 | 14 | +++ | +++ |
| 1847 | 1732 | 1754 | 12 | 1740 | 8 | +++ | +++ |
| 1854 | 1732 | 1754 | 12 | 1742 | 10 | +++ | +++ |
| 1866 | 1732 | 1754 | 12 | 1744 | 12 | +++ | +++ |
| 1877 | 1732 | 1754 | 12 | 1746 | 14 | +++ | +++ |
| 1849 | 1732 | 1755 | 13 | 1740 | 8 | +++ | +++ |
| 1860 | 1732 | 1755 | 13 | 1742 | 10 | +++ | +++ |
| 1867 | 1732 | 1755 | 13 | 1744 | 12 | +++ | +++ |
| 1881 | 1732 | 1755 | 13 | 1746 | 14 | +++ | ++ |
| 1853 | 1732 | 1756 | 14 | 1740 | 8 | +++ | +++ |
| 1861 | 1732 | 1756 | 14 | 1742 | 10 | +++ | +++ |
| 1879 | 1732 | 1756 | 14 | 1744 | 12 | +++ | +++ |
| 1889 | 1732 | 1756 | 14 | 1746 | 14 | +++ | +++ |
| 1859 | 1732 | 1757 | 15 | 1740 | 8 | ++++ | +++ |
| 1868 | 1732 | 1757 | 15 | 1742 | 10 | +++ | +++ |
| 1880 | 1732 | 1757 | 15 | 1744 | 12 | +++ | +++ |
| 1898 | 1732 | 1757 | 15 | 1746 | 14 | +++ | +++ |
| 1863 | 1732 | 1758 | 16 | 1740 | 8 | +++ | +++ |
| 1878 | 1732 | 1758 | 16 | 1742 | 10 | +++ | +++ |
| 1886 | 1732 | 1758 | 16 | 1744 | 12 | +++ | +++ |
| 1900 | 1732 | 1758 | 16 | 1746 | 14 | +++ | +++ |
| 1873 | 1732 | 1759 | 17 | 1740 | 8 | +++ | +++ |
| 1884 | 1732 | 1759 | 17 | 1742 | 10 | +++ | ++ |
| 1895 | 1732 | 1759 | 17 | 1744 | 12 | +++ | +++ |
| 1907 | 1732 | 1759 | 17 | 1746 | 14 | +++ | +++ |
| 1888 | 1732 | 1762 | 20 | 1740 | 8 | +++ | ++ |
| 1906 | 1732 | 1762 | 20 | 1742 | 10 | +++ | +++ |
| 1917 | 1732 | 1762 | 20 | 1744 | 12 | ++ | + |
| 1929 | 1732 | 1762 | 20 | 1746 | 14 | +++ | +++ |
| 1653 | 1533 | 1557 | 14 | 1543 | 10 | +++ | + |
| 1666 | 1533 | 1557 | 14 | 1547 | 14 | +++ | + |
| 1657 | 1533 | 1558 | 15 | 1543 | 10 | + | + |
| 1674 | 1533 | 1558 | 15 | 1547 | 14 | +++ | + |
| 1667 | 1533 | 1561 | 18 | 1543 | 10 | +++ | + |
| 1693 | 1533 | 1561 | 18 | 1547 | 14 | +++ | + |
| 1676 | 1533 | 1562 | 19 | 1543 | 10 | +++ | + |
| 1698 | 1533 | 1562 | 19 | 1547 | 14 | +++ | + |
| 1681 | 1533 | 1563 | 20 | 1543 | 10 | +++ | + |
| 1699 | 1533 | 1563 | 20 | 1547 | 14 | +++ | + |
| 1279 | 738 | 785 | 15 | 747 | 10 | + | + |
| 1340 | 738 | 785 | 15 | 751 | 14 | + | + |
| 1299 | 738 | 788 | 16 | 747 | 10 | + | + |
| 1365 | 738 | 788 | 16 | 751 | 14 | ++ | + |
| 1352 | 738 | 802 | 19 | 747 | 10 | + | + |
| 1425 | 738 | 802 | 19 | 751 | 14 | + | + |
| 1361 | 738 | 809 | 20 | 747 | 10 | + | + |
| 1446 | 738 | 809 | 20 | 751 | 14 | + | + |
| 1288 | 738 | 782 *80 | 15 | 747 | 10 | + | + |
| 1348 | 738 | 782 *80 | 15 | 751 | 14 | ++ | + |
| 1297 | 738 | 791 *80 | 16 | 747 | 10 | + | + |
| 1363 | 738 | 791 *80 | 16 | 751 | 14 | + | + |
| 1345 | 738 | 805 *80 | 19 | 747 | 10 | ++ | + |
| 1424 | 738 | 805 *80 | 19 | 751 | 14 | ++ | + |
| 1358 | 738 | 807 *80 | 20 | 747 | 10 | ++ | + |
| 1440 | 738 | 807 *80 | 20 | 751 | 14 | + | + |
| 1287 | 738 | 784 *81 | 15 | 747 | 10 | ++ | + |
| 1344 | 738 | 784 *81 | 15 | 751 | 14 | + | + |
| 1294 | 738 | 789 *81 | 16 | 747 | 10 | ++ | + |
| 1376 | 738 | 789 *81 | 16 | 751 | 14 | ++ | + |
| 1350 | 738 | 803 *81 | 19 | 747 | 10 | ++ | + |
| 1421 | 738 | 803 *81 | 19 | 751 | 14 | ++ | + |
| 1366 | 738 | 810 *81 | 20 | 747 | 10 | +++ | + |
| 1450 | 738 | 810 *81 | 20 | 751 | 14 | + | + |
| 1286 | 738 | 783 *82 | 15 | 747 | 10 | + | + |
| 1338 | 738 | 783 *82 | 15 | 751 | 14 | + | + |
| 1292 | 738 | 790 *82 | 16 | 747 | 10 | + | + |
| 1357 | 738 | 790 *82 | 16 | 751 | 14 | + | + |
| 1347 | 738 | 804 *82 | 19 | 747 | 10 | + | + |
| 1433 | 738 | 804 *82 | 19 | 751 | 14 | + | + |
| 1360 | 738 | 808 *82 | 20 | 747 | 10 | + | + |
| 1447 | 738 | 808 *82 | 20 | 751 | 14 | + | + |

¹1.Indicated PEgRNA sequence does not contain the 3′ linker and hairpin motif used experimentally. The experimental PEgRNA further contained 3′ mN*mN*mN*N and 5′ mN*mN*mN*modifications, where m indicates that the nucleotide contains a 2′-O-Me modification and a * indicates a phosphorothioate bond.
²*## = RTT encodes a PAM silencing mutation (see table 85).
³+ = 0.08%-0.50%, ++ = 0.50%-0.86%, +++ = 0.86%-7.40%, ++++ = 7.40%-25.16%

TABLE 102
Average Percent Edit by Spacer in PE2 Screen
at R778L mutation site in HEK293T cells

| Spacer | Avg. % | Avg. % |
|---|---|---|
| SEQ ID NO: | Edit¹ | Indel¹ |
| 2132 | ++++ | ++ |
| 1732 | +++ | +++ |
| 1533 | +++ | + |
| 738 | + | + |

2. + = 0.08%-0.50%, ++ = 0.50%-0.86%, +++ = 0.86%-7.40%, ++++ = 7.40%-25.16%

[0664] Similarly to Example 3, PEgRNA incorporating Spacer 1 produced the highest average Prime Editing frequency, with the next highest editing achieved with Spacer 2. Spacer 3 did not produce as high an average edit percentage as Spacer 2; however, the average indels for Spacer 3 were lower than for Spacer 2. PEgRNAs incorporating Spacer 4 had, on average, low activity in the PE2 screen.

### Example 6—Prime Editing at the Endogenous ATP7B R778L Mutation Site in Mammalian Cells Using Synthetic PEgRNA in a PE3 System

[0665] An ATP7B R778L mutation was installed at the endogenous ATP7B locus in HEK293T by prime editing and single-cell clones were obtained via limiting dilution and clonal expansion, as described in Example 1. A PE3 screen measuring percent correction and indel formation was performed at the endogenous ATP7B R778L locus. The cells were transfected with mRNA encoding a prime editor, and synthetic PEgRNA and ngRNA, as described in Example 1.

[0666] The results of the PE3 screen are provided in Tables 103a=103e. Below each of Tables 103a-103e is a table summarizing the PEgRNAs used experimentally(Tables 104a-104e). Each of the PEgRNA were tested in combination with multiple ngRNA. Some of the ngRNA were designed for a PE3B strategy and contain spacers complementary to the portion of the edit strand containing the edit. These results demonstrate the successful correction of the R778L mutation at the endogenous ATP7B locus in mammalian cells using synthetic PEgRNA and ngRNA in both PE3 and PE3B Prime Editing systems.

TABLE 103a
PE3 screen at the R778L mutation site in HEK293T cells

| | | PEgRNA³ SEQ ID NO: | | | | | | | | | |
|---|---|---|---|---|---|---|---|---|---|---|---|
| | | 3434 | | 3384 | | 3418 | | 3431 | | 3437 | |
| | | % | % | % | % | % | % | % | % | % | % |
| | | Edit¹ | indel¹ | Edit¹ | indel¹ | Edit¹ | indel¹ | Edit¹ | indel¹ | Edit¹ | indel¹ |
| ngRNA | PE2 | | | ++++ | + | ++++ | + | ++++ | + | +++ | + |
| spacer^{2,3} | * | +++ | + | +++ | ++ | +++ | ++ | +++ | + | +++ | + |
| SEQ | ** | +++ | + | ++++ | + | +++ | + | +++ | + | +++ | + |
| ID NO: | *** | +++ | + | ++++ | + | ++++ | + | +++ | + | +++ | + |
| | 3269 | ++++ | ++ | ++++ | ++ | ++++ | ++ | ++++ | ++ | ++++ | ++ |
| | 3260 | ++++ | ++ | ++++ | ++ | ++++ | ++ | +++ | ++ | +++ | ++ |
| | 3279 | ++++ | ++ | ++++ | ++ | ++++ | ++ | ++++ | ++ | ++++ | ++ |
| | 3244 | ++++ | + | ++++ | ++ | ++++ | ++ | +++ | ++ | +++ | ++ |

¹+ = 0.37%-1.07%; ++ = 1.07%-6.53%; +++ = 6.53%-35.96%; ++++ = 35.96%-57.31%.
²PE3b ngRNA spacer used and matched to PAM silencing edit encoded by RTT (if any).
* = ngRNA spacer is sequence number: 2003; 3255 *57; 3265 *58; 3253 *59; 3252 *62; 3254 *60; 3251 *61; or 3256 *63.
** = ngRNA spacer is sequence number: 2000; 3271 *57; 3264 *58; 3297 *59; 3286 *62; 3294 *60; 3274 *61; or 3281 *63.
*** = ngRNA spacer is sequence number: 1994; 3272 *57; 3299 *58; 3247 *59; 3288 *62; 3258 *60; 3249 *61; 3267 *63.

TABLE 104a
Summary of PEgRNA used:

| PEgRNA³ | Spacer | RTT⁴ | | PBS | |
|---|---|---|---|---|---|
| SEQ | SEQ | SEQ | RTT | SEQ | PBS |
| ID NO: | ID NO: | ID NO: | Length | ID NO: | Length |
| 3434 | 2132 | 2237 *63 | 17 | 2140 | 8 |
| 3384 | 2132 | 2205 *63 | 14 | 2142 | 10 |
| 3418 | 2132 | 2218 *59 | 15 | 2142 | 10 |
| 3431 | 2132 | 2212 *63 | 15 | 2142 | 10 |
| 3437 | 2132 | 2235 *58 | 16 | 2142 | 10 |

³Indicated sequence sequence does not contain the 3′mU*mU*mU*U and 5′mN*mN*mN* modifications used experimentally, where m indicates that the indicated nucleotide contains a 2′-O—Me modification and a * indicates a phosphorothioate bond. In case of ngRNA, the indicated spacer was combined with the same gRNA core used in the PEgRNA.
⁴*## = RTT encodes a PAM silencing mutation (see table 85).

TABLE 103b
PE3 screen at the R778L mutation site in HEK293T cells

| | | PEgRNA³ SEQ ID NO: | | | | | | | | | |
|---|---|---|---|---|---|---|---|---|---|---|---|
| | | 3446 | | 3455 | | 3462 | | 3509 | | 3479 | |
| | | % | % | % | % | % | % | % | % | % | % |
| | | Edit¹ | indel¹ | Edit¹ | indel¹ | Edit¹ | indel¹ | Edit¹ | indel¹ | Edit¹ | indel¹ |
| ngRNA | PE2 | ++++ | + | ++++ | + | ++++ | + | ++++ | ++ | +++ | + |
| spacer^{2,3} | * | +++ | ++ | +++ | ++ | +++ | + | +++ | ++ | +++ | ++ |
| SEQ ID NO: | ** | ++++ | + | +++ | + | ++++ | + | ++++ | + | +++ | + |
| | *** | ++++ | + | ++++ | + | ++++ | + | +++ | ++ | +++ | + |
| | 3269 | ++++ | ++ | ++++ | ++ | ++++ | ++ | ++++ | ++ | ++++ | ++ |
| | 3260 | ++++ | ++ | +++ | ++ | ++++ | ++ | ++++ | ++ | ++++ | ++ |
| | 3279 | ++++ | ++ | ++++ | ++ | ++++ | ++ | ++++ | ++ | ++++ | ++ |
| | 3244 | ++++ | ++ | ++++ | ++ | ++++ | ++ | ++++ | ++ | +++ | + |

¹+ = 0.37%-1.07%; ++ = 1.07%-6.53%; +++ = 6.53%-35.96%; ++++ = 35.96%-57.31%.
²PE3b ngRNA spacer used and matched to PAM silencing edit encoded by RTT (if any).
* = ngRNA spacer is sequence number: 2003; 3255 *57; 3265 *58; 3253 *59; 3252 *62; 3254 *60; 3251 *61; or 3256 *63.
** = ngRNA spacer is sequence number: 2000; 3271 *57; 3264 *58; 3297 *59; 3297 *59; 3286 *62; 3294 *60; 3274 *61; 3281 *63.
*** = ngRNA spacer is sequence number: 1994; 3272 *57; 3299 *58; 3247 *59; 3288 *62; 3258 *60; 3249 *61; 3267 *63.

TABLE 104b
Summary of PEgRNA used:

| PEgRNA³ | Spacer | RTT⁴ | | PBS | |
|---|---|---|---|---|---|
| SEQ | SEQ | SEQ | RTT | SEQ | PBS |
| ID NO: | ID NO: | ID NO: | Length | ID NO: | Length |
| 3446 | 2132 | 2232 *59 | 16 | 2142 | 10 |
| 3455 | 2132 | 2229 *61 | 16 | 2142 | 10 |
| 3462 | 2132 | 2233 *63 | 16 | 2142 | 10 |
| 3509 | 2132 | 2245 *57 | 17 | 2142 | 10 |
| 3479 | 2132 | 2240 *58 | 17 | 2142 | 10 |

³Indicated sequence sequence does not contain the 3′mU*mU*mU*U and 5′mN*mN*mN* modifications used experimentally, where m indicates that the indicated nucleotide contains a 2′-O—Me modification and a * indicates a phosphorothioate bond. In case of ngRNA, the indicated spacer was combined with the same gRNA core used in the PEgRNA.
⁴*## = RTT encodes a PAM silencing mutation (see table 85).

TABLE 103c
PE3 screen at the R778L mutation site in HEK293T cells

| | | PEgRNA³ SEQ ID NO: | | | | | | | | | |
|---|---|---|---|---|---|---|---|---|---|---|---|
| | | 3511 | | 3519 | | 3523 | | 3477 | | 3485 | |
| | | % | % | % | % | % | % | % | % | % | % |
| | | Edit¹ | indel¹ | Edit¹ | indel¹ | Edit¹ | indel¹ | Edit¹ | indel¹ | Edit¹ | indel¹ |
| n | PE2 | ++++ | + | ++++ | + | ++++ | + | +++ | + | | |
| [symbol] | * | +++ | ++ | +++ | + | +++ | ++ | +++ | + | +++ | + |
| | ** | ++++ | + | +++ | + | ++++ | + | +++ | + | +++ | + |
| | *** | ++++ | + | +++ | + | ++++ | + | +++ | + | +++ | + |
| | 3269 | ++++ | ++ | ++++ | ++ | ++++ | ++ | ++++ | ++ | +++ | ++ |
| | 3260 | ++++ | ++ | +++ | ++ | +++ | ++ | +++ | + | +++ | + |
| | 3279 | ++++ | ++ | ++++ | ++ | ++++ | ++ | ++++ | ++ | ++++ | ++ |
| | 3244 | ++++ | ++ | ++++ | ++ | ++++ | ++ | ++++ | ++ | +++ | + |

¹+ = 0.37%-1.07%; ++ = 1.07%-6.53%; +++ = 6.53%-35.96%; ++++ = 35.96%-57.31%.
²PE3b ngRNA spacer used and matched to PAM silencing edit encoded by RTT (if any).
* = ngRNA spacer is sequence number: 2003; 3255 *57; 3265 *58; 3253 *59; 3252 *62; 3254 *60; 3251 *61; or 3256 *63.
** = ngRNA is sequence number: 2000; 3271 *57; 3264 *58; 3297 *59; 3286 *62; 3294 *60; 3274 *61; or 3281 *63.
*** = ngRNA spacer is sequence number: 1994; 3272 *57; 3299 *58; 3247 *59; 3288 *62; 3258 *60; 3249 *61; 3267 *63. [symbol]
indicates data missing or illegible when filed

TABLE 104c
Summary of PEgRNAs used

| PEgRNA³ | Spacer | RTT⁴ | | PBS | |
|---|---|---|---|---|---|
| SEQ | SEQ | SEQ | RTT | SEQ | PBS |
| ID NO: | ID NO: | ID NO: | Length | ID NO: | Length |
| 3511 | 2132 | 2242 *59 | 17 | 2142 | 10 |
| 3519 | 2132 | 2243 *60 | 17 | 2142 | 10 |
| 3523 | 2132 | 2236 *61 | 17 | 2142 | 10 |
| 3477 | 2132 | 2244 *62 | 17 | 2142 | 10 |
| 3485 | 2132 | 2237 *63 | 17 | 2142 | 10 |

³Indicated sequence sequence does not contain the 3′mU*mU*mU*U and 5′mN*mN*mN* modifications used experimentally, where m indicates that the indicated nucleotide contains a 2′-O—Me modification and a * indicates a phosphorothioate bond. In case of ngRNA, the indicated spacer was combined with the same gRNA core used in the PERNA.
⁴*## = RTT encodes a PAM silencing mutation (see table 85).

TABLE 103d
PE3 screen at the R778L mutation site in HEK293T cells

| | | PEgRNA³ SEQ ID NO: | | | | | | | | | |
|---|---|---|---|---|---|---|---|---|---|---|---|
| | | 3600 | | 3583 | | 3595 | | 3634 | | 3448 | |
| | | % | % | % | % | % | % | % | % | % | % |
| | | Edit¹ | indel¹ | Edit¹ | indel¹ | Edit¹ | indel¹ | Edit¹ | indel¹ | Edit¹ | indel¹ |
| ngRNA | PE2 | +++ | + | ++++ | + | ++++ | + | ++++ | ++ | +++ | + |
| [symbol] | * | +++ | + | +++ | + | +++ | + | +++ | ++ | +++ | + |
| | ** | +++ | + | ++++ | + | +++ | + | +++ | + | +++ | + |
| | *** | +++ | + | ++++ | + | +++ | + | ++++ | ++ | +++ | + |
| | 3269 | +++ | ++ | ++++ | ++ | +++ | ++ | ++++ | ++ | +++ | ++ |
| | 3260 | +++ | ++ | ++++ | ++ | +++ | + | ++++ | ++ | +++ | ++ |
| | 3279 | +++ | ++ | ++++ | ++ | ++++ | ++ | ++++ | ++ | ++++ | ++ |
| | 3244 | +++ | ++ | ++++ | ++ | ++++ | ++ | ++++ | ++ | +++ | + |

¹+ = 0.37%-1.07%; ++ = 1.07%-6.53%; +++ = 6.53%-35.96%; ++++ = 35.96%-57.31%.
²PE3b ngRNA spacer used and matched to PAM silencing edit encoded by RTT (if any).
* = ngRNA spacer is sequence number: 2003; 3255 *57; 3265 *58; 3253 *59; 3252 *62; 3254 *60; 3251 *61; or 3256 *63.
** = ngRNA spacer is sequence number: 2000; 3271 *57; 3264 *58; 3297 *59; 3286 *62; 3294 *60; 3274 *61; or 3281 *63.
*** = ngRNA spacer is sequence number: 1994; 3272 *57; 3299 *58; 3247 *59; 3288 *62; 3258 *60; 3249 *61; 3267 *63. [symbol]
indicates data missing or illegible when filed

TABLE 104d
Summary of PEgRNAs used

| PEgRNA³ | Spacer | RTT⁴ | | PBS | |
|---|---|---|---|---|---|
| SEQ | SEQ | SEQ | RTT | SEQ | PBS |
| ID NO: | ID NO: | ID NO: | Length | ID NO: | Length |
| 3600 | 2132 | 2269 *58 | 19 | 2142 | 10 |
| 3583 | 2132 | 2271 *59 | 19 | 2142 | 10 |
| 3595 | 2132 | 2264 *61 | 19 | 2142 | 10 |
| 3634 | 2132 | 2272 *62 | 20 | 2142 | 10 |
| 3448 | 2132 | 2205 *63 | 14 | 2144 | 12 |

³Indicated sequence sequence does not contain the 3′mU*mU*mU*U and 5′mN*mN*mN* modifications used experimentally, where m indicates that the indicated nucleotide contains a 2′-O—Me modification and a * indicates a phosphorothioate bond. In case of ngRNA, the indicated spacer was combined with the same gRNA core used in the PEgRNA.
⁴*## = RTT encodes a PAM silencing mutation (see table 85).

TABLE 103e
PE3 screen at the R778L mutation
site in HEK293T cells

| | | PERNA³ SEQ ID NO: | | | | | |
|---|---|---|---|---|---|---|---|
| | | 3527 | | 3604 | | 3681 | |
| | | % | % | % | % | % | % |
| | | Edit¹ | indel¹ | Edit¹ | indel¹ | Edit¹ | indel¹ |
| ngRNA | PE2 | +++ | + | +++ | + | +++ | + |
| [symbol] | * | +++ | + | +++ | + | +++ | + |
| | ** | +++ | + | +++ | + | +++ | + |
| | *** | +++ | + | +++ | + | +++ | + |
| | 3269 | +++ | ++ | +++ | ++ | ++++ | ++ |
| | 3260 | +++ | + | +++ | + | +++ | ++ |
| | 3279 | +++ | ++ | +++ | + | ++++ | ++ |
| | 3244 | +++ | ++ | +++ | + | +++ | + |

¹+ = 0.37%-1.07%; ++ = 1.07%-6.53%; +++ = 6.53%-35.96%; ++++ = 35.96%-57.31%.
²PE3b ngRNA spacer used and matched to PAM silencing edit encoded by RTT (if any).
* = ngRNA spacer is sequence number: 2003; 3255 *57; 3265 *58; 3253 *59; 3252 *62; 3254 *60; 3251 *61; or 3256 *63.
** = ngRNA spacer is sequence number: 2000; 3271 *57; 3264 *58; 3297 *59; 3286 *62; 3294 *60; 3274 *61; or 3281 *63.
*** = ngRNA spacer is sequence number: 1994; 3272 *57; 3299 *58; 3247 *59; 3288 *62; 3258 *60; 3249 *61; 3267 *63. [symbol]
indicates data missing or illegible when filed

TABLE 104e
Summary of PEgRNAs used

| PERNA³ | Spacer | RTT⁴ | | PBS | |
|---|---|---|---|---|---|
| SEQ | SEQ | SEQ | RTT | SEQ | PBS |
| ID NO: | ID NO: | ID NO: | Length | ID NO: | Length |
| 3527 | 2132 | 2233 *63 | 16 | 2144 | 12 |
| 3604 | 2132 | 2240 *58 | 17 | 2144 | 12 |
| 3681 | 2132 | 2240 *58 | 17 | 2146 | 14 |

³Indicated sequence sequence does not contain the 3′mU*mU*mU*U and 5′mN*mN*mN* modifications used experimentally, where m indicates that the indicated nucleotide contains a 2′-O—Me modification and a * indicates a phosphorothioate bond. In case of ngRNA, the indicated spacer was combined with the same gRNA core used in the PEgRNA.
⁴*## = RTT encodes a PAM silencing mutation (see table 85).

### Example 7—Prime Editing in Primary Human Hepatocytes (PHI)

[0667] Primary Human Hepatocytes Hu8391 were obtained from Thermo Scientific and were cultured according to the manufacturer protocols. 40 K cells were plated in 96-well plate and twenty-four later cells were transfected with Messenger Max according to the manufacturer's directions with mRNA encoding a prime editor, and synthetic PEgRNA and ngRNA. Three days after transfection, gDNA was harvested in quick DNA extract for high throughput sequencing and sequenced using miseq. Because the PHH were wild-type, the genomic DNA was analyzed for synonymous PAM silencing mutations near the R778 locus in ATP7b. The results are shown in Table 105 (PE3) and Table 106 (PE3b). These results demonstrate successful Prime Editing at the R778 mutation site in clinically relevant cells types using both PE3 and PE3b editing strategies.

TABLE 105
Prime Editing in primary human hepatocytes using a PE3 system

| PEgRNA¹ | Spacer | RTT² | RTT | PBS | PBS | ngRNA¹ | % | % |
|---|---|---|---|---|---|---|---|---|
| Seq. # | Seq.# | Seq. # | Len. | Seq. # | Len. | Seq. # | Edit³ | Indel³ |
| 14773 | 2132 | 2235 *58 | 16 | 2142 | 10 | 14800 | ++++ | + |
| 14778 | 2132 | 2240 *58 | 17 | 2142 | 10 | 14800 | ++++ | + |
| 14784 | 2132 | 2269 *58 | 19 | 2142 | 10 | 14800 | ++++ | + |
| 14790 | 2132 | 2240 *58 | 17 | 2144 | 12 | 14800 | ++++ | + |
| 14791 | 2132 | 2240 *58 | 17 | 2146 | 14 | 14800 | ++++ | + |
| 14769 | 2132 | 2237 *63 | 17 | 2140 | 8 | 14800 | +++ | + |
| 14770 | 2132 | 2205 *63 | 14 | 2142 | 10 | 14800 | +++ | ++ |
| 14772 | 2132 | 2212 *63 | 15 | 2142 | 10 | 14800 | +++ | ++ |
| 14776 | 2132 | 2233 *63 | 16 | 2142 | 10 | 14800 | ++++ | ++ |
| 14783 | 2132 | 2237 *63 | 17 | 2142 | 10 | 14800 | +++ | ++ |
| 14788 | 2132 | 2205 *63 | 14 | 2144 | 12 | 14800 | +++ | ++ |
| 14789 | 2132 | 2233 *63 | 16 | 2144 | 12 | 14800 | ++++ | ++ |
| 14771 | 2132 | 2218 *59 | 15 | 2142 | 10 | 14800 | +++ | ++ |
| 14774 | 2132 | 2232 *59 | 16 | 2142 | 10 | 14800 | +++ | ++ |
| 14779 | 2132 | 2242 *59 | 17 | 2142 | 10 | 14800 | +++ | ++ |
| 14785 | 2132 | 2271 *59 | 19 | 2142 | 10 | 14800 | +++ | ++ |
| 14777 | 2132 | 2245 *57 | 17 | 2142 | 10 | 14800 | +++ | ++ |
| 14775 | 2132 | 2229 *61 | 16 | 2142 | 10 | 14800 | ++++ | + |
| 14781 | 2132 | 2236 *61 | 17 | 2142 | 10 | 14800 | ++++ | + |
| 14786 | 2132 | 2264 *61 | 19 | 2142 | 10 | 14800 | ++++ | + |
| 14780 | 2132 | 2243 *60 | 17 | 2142 | 10 | 14800 | +++ | ++ |
| 14782 | 2132 | 2244 *62 | 17 | 2142 | 10 | 14800 | +++ | ++ |
| 14787 | 2132 | 2272 *62 | 20 | 2142 | 10 | 14800 | +++ | ++ |

¹The experimental PEgRNA and ngRNA contained 3′ mN*mN*mN*N and 5′ mN*mN*mN*modifications, where m indicates that the nucleotide contains 2′-O-Me modification and a *indicates a phosphorothioate bond. The SEQ ID NO: of the ngRNA spacer is 3269.
²*## = RTT encodes a PAM silencing mutation (see table 85).
³+ = 0.49%-1.36%, ++ = 1.36%-15.41%, +++ = 15.41%-44.10%, ++++ = 44.10%-68.41%.

TABLE 106
Prime Editing in primary human heptocytes using a PE3b system

| PEgRNA¹ | Spacer | RTT² | RTT | PBS | PBS | ngRNA¹ | % | % |
|---|---|---|---|---|---|---|---|---|
| Seq. # | Seq. # | Seq. # | Len. | Seq. # | Len. | Seq. # | Edit³ | Indel³ |
| 14773 | 2132 | 2235 *58 | 16 | 2142 | 10 | 14807; | ++++ | + |
| | | | | | | 3299 *58 | | |
| 14778 | 2132 | 2240 *58 | 17 | 2142 | 10 | 14807; | ++++ | + |
| | | | | | | 3299 *58 | | |
| 14784 | 2132 | 2269 *58 | 19 | 2142 | 10 | 14807; | ++++ | + |
| | | | | | | 3299 *58 | | |
| 14790 | 2132 | 2240 *58 | 17 | 2144 | 12 | 14807; | ++++ | ++ |
| | | | | | | 3299 *58 | | |
| 14791 | 2132 | 2240 *58 | 17 | 2146 | 14 | 14807; | ++++ | + |
| | | | | | | 3299 *58 | | |
| 14769 | 2132 | 2237 *63 | 17 | 2140 | 8 | 14805; | +++ | + |
| | | | | | | 3267 *63 | | |
| 14770 | 2132 | 2205 *63 | 14 | 2142 | 10 | 14805; | ++++ | ++ |
| | | | | | | 3267 *63 | | |
| 14772 | 2132 | 2212 *63 | 15 | 2142 | 10 | 14805; | +++ | + |
| | | | | | | 3267 *63 | | |
| 14776 | 2132 | 2233 *63 | 16 | 2142 | 10 | 14805; | ++++ | ++ |
| | | | | | | 3267 *63 | | |
| 14783 | 2132 | 2237 *63 | 17 | 2142 | 10 | 14805; | ++++ | ++ |
| | | | | | | 3267 *63 | | |
| 14788 | 2132 | 2205 *63 | 14 | 2144 | 12 | 14805; | ++++ | ++ |
| | | | | | | 3267 *63 | | |
| 14789 | 2132 | 2233 *63 | 16 | 2144 | 12 | 14805; | ++++ | ++ |
| | | | | | | 3267 *63 | | |
| 14771 | 2132 | 2218 *59 | 15 | 2142 | 10 | 14803; | +++ | + |
| | | | | | | 3247 *59 | | |
| 14774 | 2132 | 2232 *59 | 16 | 2142 | 10 | 14803; | +++ | ++ |
| | | | | | | 3247 *59 | | |
| 14779 | 2132 | 2242 *59 | 17 | 2142 | 10 | 14803; | +++ | ++ |
| | | | | | | 3247 *59 | | |
| 14785 | 2132 | 2271 *59 | 19 | 2142 | 10 | 14803; | +++ | + |
| | | | | | | 3247 *59 | | |
| 14777 | 2132 | 2245 *57 | 17 | 2142 | 10 | 14808; | ++++ | + |
| | | | | | | 3272 *57 | | |
| 14775 | 2132 | 2229 *61 | 16 | 2142 | 10 | 14804; | ++++ | + |
| | | | | | | 3249 *61 | | |
| 14781 | 2132 | 2236 *61 | 17 | 2142 | 10 | 14804; | ++++ | + |
| | | | | | | 3249 *61 | | |
| 14786 | 2132 | 2264 *61 | 19 | 2142 | 10 | 14804; | +++ | + |
| | | | | | | 3249 *61 | | |
| 14780 | 2132 | 2243 *60 | 17 | 2142 | 10 | 14809; | +++ | + |
| | | | | | | 3258 *60 | | |
| 14782 | 2132 | 2244 *62 | 17 | 2142 | 10 | 14806; | +++ | + |
| | | | | | | 3288 *62 | | |
| 14787 | 2132 | 2272 *62 | 20 | 2142 | 10 | 14806; | +++ | ++ |
| | | | | | | 3288 *62 | | |

¹The experimental PEgRNA and ngRNA contained 3′ mN*mN*mN*N and 5′ mN*mN*mN*modifications, where m indicates that the nucleotides contains a 2′-O-Me modification and a * indicates a phosphorothioate bond. The indicated sequence numbers for the ngRNA represents the ngRNA followed by the ngRNA spacers; *## following with ngRNA spacer sequence number indicates that the spacer is complementary to a PAM silencing mutation (see table 85).
²*## = RTT encodes a PAM silencing mutation (see table 85).
³+ = 0.49%-1.36%, ++ = 1.36%-15.41%, +++ = 15.41%-44.10%, ++++ = 44.10%-68.41%.

### Example 8S—Phenotypic Rescue by Prime Editing

[0668] Human induced pluripotent ceils (hiPSC) were maintained in mTeSR Plus media on Matrigel-coated plates and differentiated them into hepatocytes using modified protocol from Wilson AA (Cell Reports, 2015). Briefly, after induction of definitive endoderm cells were replaced into new Matrigel-coated plates and differentiation was completed in IMDM/Ham's F12 media supplemented with B-27 and N2 supplements and growth factors. For editing and Phenotypic rescue experiment, 50K ceils of early-stage differentiated iHeps were replated on 96-well plates on day 13 cells and were transfected using Lipofectamine Messenger Max according to manufacturer protocols with mRNA encoding a prime editor, and synthetic PEgRNA and ngRNA, on the day 16, 19, 21 of the differentiation. Following transfection, the cells were challenged with Cu on day 27^{th} at a conc of 250 uM. Forty-eight hrs later (day 29^{th}), phenotypic rescue of the edited was measured by cell viability assay using cell titer glow from Promega according to the manufacture's protocol. The viability of the edited cells was normalized to the transfected cells with 0 Cu treatment and the phenotypic recue was measured relative to the untransfected cells challenged with the cu at 250 uM. Editing in these cells were measured in parallel by harvesting them in quick DNA extract for high throughput sequencing using miseq. Increased cell viability was seen with correction of the R778R mutation using a PE3 Prime Editing system (data not shown).

LENGTHY TABLES
The patent application contains a lengthy table section. A copy of the table is available in electronic form from the USPTO web site (https://seqdata.uspto.gov/?pageRequest=docDetail&DocID=US20240229038A1). An electronic copy of the table will also be available from the USPTO upon request and payment of the fee set forth in 37 CFR 1.19(b)(3).

1. A prime editing guide RNA (PEgRNA) comprising:
a. a spacer that is complementary to a search target sequence on a first strand of an ATP7B gene, wherein the spacer comprises at its 3′ end SEQ ID NO: 2128;
b. a gRNA core capable of binding to a Cas9 protein;
c. an extension arm comprising:
i. an editing template that comprises a region of complementarity to an editing target sequence on a second strand of the ATP7B gene, and
ii. a primer binding site that comprises at its 5′ end a sequence that is a reverse complement of nucleotides 11-13 of SEQ ID NO: 2128;
wherein the first strand and second strand are complementary to each other and wherein the editing target sequence on the second strand is complementary to a portion of the ATP7B gene comprising a c.2333G>T substitution.

2. A prime editing guide RNA (PEgRNA) comprising:
a. a spacer comprising at its 3′ end nucleotides SEQ ID NO: 2128;
b. a gRNA core capable of binding to a Cas9 protein, and
c. an extension arm comprising:
i. an editing template comprising at its 3′ end any one of SEQ ID NOs: 2152-2161, and
ii. a primer binding site (PBS) comprising at its 5′ end a sequence that is a reverse complement of nucleotides 11-13 of SEQ ID NO: 2128.

3. (canceled)

4. The PEgRNA of claim 1, wherein the spacer of the PEgRNA comprises at its 3′ end any one of SEQ ID NOs: 2129-2134.

5-8. (canceled)

9. The PEgRNA of claim 1, wherein:
(i) the editing template comprises SEQ ID NO: 2152 at its 3′ end and encodes a CGG-to-CTG PAM silencing edit,
(ii) the editing template comprises SEQ ID NO: 2154 at its 3′ end and encodes a CGG-to-CGT PAM silencing edit,
(iii) the editing template comprises SEQ ID NO: 2155 at its 3′ end and encodes a CGG-to-CGA PAM silencing edit,
(iv) the editing template comprises SEQ ID NO: 2156 at its 3′ end and encodes a CCGG-to-TCTA PAM silencing edit,
(v) the editing template comprises SEQ ID NO: 2157 at its 3′ end and encodes a CGG-to-CTT PAM silencing edit,
(vi) the editing template comprises SEQ ID NO: 2158 at its 3′ end and encodes a CCGG-to-TCTG PAM silencing edit,
(vii) the editing template comprises SEQ ID NO: 2159 at its 3′ end and encodes a CGG-to-CGC PAM silencing edit,
(viii) the editing template comprises SEQ ID NO: 2160 at its 3′ end and encodes a CGG-to-CTA PAM silencing edit,
(ix) the editing template comprises SEQ ID NO: 2161 at its 3′ end and encodes a CCGG-to-TCTC PAM silencing edit, or
(x) the editing template comprises SEQ ID NO: 2162 at its 3′ end.

10-35. (canceled)

36. The PEgRNA of claim 1, comprising a pegRNA sequence selected from any one of SEQ ID NOs: 14769, 14770, 14771, 14772, 14773, 14774, 14775, 14776, 14777, 14778, 14779, 14780, 14781, 14782, 14783, 14784, 14785, 14786, 14787, 14788, 14789, 14790, 14791, 14792, 14793, 14794, 14795, 14796, 14797, 14798, or 14799.

37. (canceled)

38. A prime editing system comprising:
a. the prime editing guide RNA (PEgRNA) of claim 1, or a nucleic acid encoding the PEgRNA; and
b. a nick guide RNA (ngRNA) comprising at its 3′ end nucleotides 5-20 of any one of SEQ ID NOs: 63, 88, 1994, 2000, 2004, 2005, 2006, 2056, 2057, 2058, 2059, 2125, 2126, 2127, 3244, 3245, 3246, 3247, 3248, 3249, 3250, 3251, 3252, 3253, 3254, 3255, 3256, 3257, 3258, 3259, 3260, 3261, 3262, 3263, 3264, 3265, 3266, 3267, 3268, 3269, 3270, 3271, 3272, 3273, 3274, 3275, 3276, 3277, 3278, 3279, 3280, 3281, 3282, 3283, 3284, 3285, 3286, 3287, 3288, 3289, 3290, 3291, 3292, 3293, 3294, 3295, 3296, 3297, 3298, or 3299, and a gRNA core capable of binding to a Cas9 protein, or a nucleic acid encoding the ngRNA.

39. (canceled)

40. The prime editing system of claim 38, wherein the spacer of the ngRNA comprises at its 3′ end nucleotides 4-20, 3-20, 2-20, or 1-20 of SEQ ID NO: 63, 88, 1994, 2000, 2004, 2005, 2006, 2056, 2057, 2058, 2059, 2125, 2126, 2127, 3244, 3245, 3246, 3247, 3248, 3249, 3250, 3251, 3252, 3253, 3254, 3255, 3256, 3257, 3258, 3259, 3260, 3261, 3262, 3263, 3264, 3265, 3266, 3267, 3268, 3269, 3270, 3271, 3272, 3273, 3274, 3275, 3276, 3277, 3278, 3279, 3280, 3281, 3282, 3283, 3284, 3285, 3286, 3287, 3288, 3289, 3290, 3291, 3292, 3293, 3294, 3295, 3296, 3297, 3298, or 3299.

41. The prime editing system of claim 38, wherein the spacer of the ngRNA comprises at its 3′ end SEQ ID NO: 63, 88, 1994, 2000, 2004, 2005, 2006, 2056, 2057, 2058, 2059, 2125, 2126, 2127, 3244, 3245, 3246, 3247, 3248, 3249, 3250, 3251, 3252, 3253, 3254, 3255, 3256, 3257, 3258, 3259, 3260, 3261, 3262, 3263, 3264, 3265, 3266, 3267, 3268, 3269, 3270, 3271, 3272, 3273, 3274, 3275, 3276, 3277, 3278, 3279, 3280, 3281, 3282, 3283, 3284, 3285, 3286, 3287, 3288, 3289, 3290, 3291, 3292, 3293, 3294, 3295, 3296, 3297, 3298, or 3299.

42-57. (canceled)

58. An LNP comprising the prime editing system of claim 38.

59-62. (canceled)

63. A method of correcting for editing an ATP7B gene in a cell, the method comprising contacting the ATP7B gene with the PEgRNA of claim 1.

64-70. (canceled)

71. The method of claim 63, wherein the cell is from a subject having Wilson's disease.

72. The method of claim 71, further comprising administering the cell to the subject after incorporation of the intended nucleotide edit.

73-74. (canceled)

75. A method for treating Wilson's disease in a subject in need thereof, the method comprising administering to the subject the PEgRNA of claim 1.

76-77. (canceled)

78. A prime editing guide RNA (PEgRNA) comprising:
a. a spacer comprising at its 3′ end nucleotides 5-20 of a PEgRNA Spacer sequence selected from any one of Tables 1-84;
b. a gRNA core capable of binding to a Cas9 protein, and
c. an extension arm comprising:
i. an editing template comprising at its 3′ end an RTT sequence selected from the same Table as the PEgRNA Spacer sequence, and
ii. a primer binding site (PBS) comprising at its 5′ end a PBS sequence selected from the same Table as the PEgRNA Spacer sequence.

79-83. (canceled)

84. A prime editing system comprising:
a. the prime editing guide RNA (PEgRNA) of claim 78, or a nucleic acid encoding the PEgRNA; and
b. a nick guide RNA (ngRNA) comprising a spacer comprising at its 3′ end nucleotides 5-20 of any ngRNA Spacer sequence selected from the same Table as the PEgRNA Spacer sequence and a gRNA core capable of binding to a Cas9 protein, or a nucleic acid encoding the ngRNA.

85-94. (canceled)

95. An LNP comprising the prime editing system of claim 84.

96-99. (canceled)

100. A method of correcting for editing an ATP7B gene, the method comprising contacting the ATP7B gene with the PEgRNA of claim 78.

101. The method of claim 100, wherein the ATP7B gene is in a cell, and further comprising administering the cell to the subject after incorporation of the intended nucleotide edit.

102-109. (canceled)

110. A cell generated by the method of claim 100.

111. (canceled)

112. A method for treating Wilson's disease in a subject in need thereof, the method comprising administering to the subject the PEgRNA of claim 78.

113-116. (canceled)

The application's sequence listing, which the Patent Office published only in electronic form, follows.

SEQUENCE LISTING (14974 sequences)

SEQ ID NO: 1 - RNA, 16 nt, synthetic construct
  source 1..16: mol_type = other RNA
tattctctggtcatcc

SEQ ID NO: 2 - RNA, 17 nt, synthetic construct
  source 1..17: mol_type = other RNA
ttattctctggtcatcc

SEQ ID NO: 3 - RNA, 18 nt, synthetic construct
  source 1..18: mol_type = other RNA
tttattctctggtcatcc

SEQ ID NO: 4 - RNA, 19 nt, synthetic construct
  source 1..19: mol_type = other RNA
gtttattctctggtcatcc

SEQ ID NO: 5 - RNA, 20 nt, synthetic construct
  source 1..20: mol_type = other RNA
tgtttattctctggtcatcc

SEQ ID NO: 6 - RNA, 21 nt, synthetic construct
  source 1..21: mol_type = other RNA
atgtttattctctggtcatcc

SEQ ID NO: 7 - RNA, 22 nt, synthetic construct
  source 1..22: mol_type = other RNA
tatgtttattctctggtcatcc

SEQ ID NO: 8-14 - skipped (7 entries)

SEQ ID NO: 15 - RNA, 10 nt, synthetic construct
  source 1..10: mol_type = other RNA
tgaccagaga

SEQ ID NO: 16 - RNA, 11 nt, synthetic construct
  source 1..11: mol_type = other RNA
tgaccagagaa

SEQ ID NO: 17 - RNA, 12 nt, synthetic construct
  source 1..12: mol_type = other RNA
tgaccagagaat

SEQ ID NO: 18 - RNA, 13 nt, synthetic construct
  source 1..13: mol_type = other RNA
tgaccagagaata

SEQ ID NO: 19 - RNA, 14 nt, synthetic construct
  source 1..14: mol_type = other RNA
tgaccagagaataa

SEQ ID NO: 20 - RNA, 15 nt, synthetic construct
  source 1..15: mol_type = other RNA
tgaccagagaataaa

SEQ ID NO: 21 - RNA, 16 nt, synthetic construct
  source 1..16: mol_type = other RNA
tgaccagagaataaac

SEQ ID NO: 22 - RNA, 17 nt, synthetic construct
  source 1..17: mol_type = other RNA
tgaccagagaataaaca

SEQ ID NO: 23 - RNA, 18 nt, synthetic construct
  source 1..18: mol_type = other RNA
tgaccagagaataaacat

SEQ ID NO: 24 - RNA, 19 nt, synthetic construct
  source 1..19: mol_type = other RNA
tgaccagagaataaacata

SEQ ID NO: 25 - RNA, 94 nt, synthetic construct
  source 1..94: mol_type = other RNA
cggcccagggcaatgaacacaaagagcatggggggcgtgtcgaagaatgtcacagggctcctctccgccttctcagccacagcaaccaccagga

SEQ ID NO: 26 - RNA, 94 nt, synthetic construct
  source 1..94: mol_type = other RNA
cggcccagggcaatgaacacaaagagcatggggggcgtgtcgaagaatgtcacagggctcctctccgccttctcagccacagcaaccactaaga

SEQ ID NO: 27 - RNA, 94 nt, synthetic construct
  source 1..94: mol_type = other RNA
cggcccagggcaatgaacacaaagagcatggggggcgtgtcgaagaatgtcacagggctcctctccgccttctcagccacagcaaccactagga

SEQ ID NO: 28 - RNA, 94 nt, synthetic construct
  source 1..94: mol_type = other RNA
cggcccagggcaatgaacacaaagagcatggggggcgtgtcgaagaatgtcacagggctcctctccgccttctcagccacagcaaccacaagga

SEQ ID NO: 29 - RNA, 94 nt, synthetic construct
  source 1..94: mol_type = other RNA
cggcccagggcaatgaacacaaagagcatggggggcgtgtcgaagaatgtcacagggctcctctccgccttctcagccacagcaaccacgagga

SEQ ID NO: 30 - RNA, 95 nt, synthetic construct
  source 1..95: mol_type = other RNA
ccggcccagggcaatgaacacaaagagcatggggggcgtgtcgaagaatgtcacagggctcctctccgccttctcagccacagcaaccacaagga

SEQ ID NO: 31 - RNA, 95 nt, synthetic construct
  source 1..95: mol_type = other RNA
ccggcccagggcaatgaacacaaagagcatggggggcgtgtcgaagaatgtcacagggctcctctccgccttctcagccacagcaaccactagga

SEQ ID NO: 32 - RNA, 95 nt, synthetic construct
  source 1..95: mol_type = other RNA
ccggcccagggcaatgaacacaaagagcatggggggcgtgtcgaagaatgtcacagggctcctctccgccttctcagccacagcaaccactaaga

SEQ ID NO: 33 - RNA, 95 nt, synthetic construct
  source 1..95: mol_type = other RNA
ccggcccagggcaatgaacacaaagagcatggggggcgtgtcgaagaatgtcacagggctcctctccgccttctcagccacagcaaccaccagga

SEQ ID NO: 34 - RNA, 95 nt, synthetic construct
  source 1..95: mol_type = other RNA
ccggcccagggcaatgaacacaaagagcatggggggcgtgtcgaagaatgtcacagggctcctctccgccttctcagccacagcaaccacgagga

SEQ ID NO: 35 - RNA, 96 nt, synthetic construct
  source 1..96: mol_type = other RNA
accggcccagggcaatgaacacaaagagcatggggggcgtgtcgaagaatgtcacagggctcctctccgccttctcagccacagcaaccactaaga

SEQ ID NO: 36 - RNA, 96 nt, synthetic construct
  source 1..96: mol_type = other RNA
accggcccagggcaatgaacacaaagagcatggggggcgtgtcgaagaatgtcacagggctcctctccgccttctcagccacagcaaccaccagga

SEQ ID NO: 37 - RNA, 96 nt, synthetic construct
  source 1..96: mol_type = other RNA
accggcccagggcaatgaacacaaagagcatggggggcgtgtcgaagaatgtcacagggctcctctccgccttctcagccacagcaaccacgagga

SEQ ID NO: 38 - RNA, 96 nt, synthetic construct
  source 1..96: mol_type = other RNA
accggcccagggcaatgaacacaaagagcatggggggcgtgtcgaagaatgtcacagggctcctctccgccttctcagccacagcaaccacaagga

SEQ ID NO: 39 - RNA, 96 nt, synthetic construct
  source 1..96: mol_type = other RNA
accggcccagggcaatgaacacaaagagcatggggggcgtgtcgaagaatgtcacagggctcctctccgccttctcagccacagcaaccactagga

SEQ ID NO: 40 - RNA, 97 nt, synthetic construct
  source 1..97: mol_type = other RNA
caccggcccagggcaatgaacacaaagagcatggggggcgtgtcgaagaatgtcacagggctcctctccgccttctcagccacagcaaccacaagga

SEQ ID NO: 41 - RNA, 97 nt, synthetic construct
  source 1..97: mol_type = other RNA
caccggcccagggcaatgaacacaaagagcatggggggcgtgtcgaagaatgtcacagggctcctctccgccttctcagccacagcaaccactagga

SEQ ID NO: 42 - RNA, 97 nt, synthetic construct
  source 1..97: mol_type = other RNA
caccggcccagggcaatgaacacaaagagcatggggggcgtgtcgaagaatgtcacagggctcctctccgccttctcagccacagcaaccaccagga

SEQ ID NO: 43 - RNA, 97 nt, synthetic construct
  source 1..97: mol_type = other RNA
caccggcccagggcaatgaacacaaagagcatggggggcgtgtcgaagaatgtcacagggctcctctccgccttctcagccacagcaaccacgagga

SEQ ID NO: 44 - RNA, 97 nt, synthetic construct
  source 1..97: mol_type = other RNA
caccggcccagggcaatgaacacaaagagcatggggggcgtgtcgaagaatgtcacagggctcctctccgccttctcagccacagcaaccactaaga

SEQ ID NO: 45 - RNA, 98 nt, synthetic construct
  source 1..98: mol_type = other RNA
ccaccggcccagggcaatgaacacaaagagcatggggggcgtgtcgaagaatgtcacagggctcctctccgccttctcagccacagcaaccacaagga

SEQ ID NO: 46 - RNA, 98 nt, synthetic construct
  source 1..98: mol_type = other RNA
ccaccggcccagggcaatgaacacaaagagcatggggggcgtgtcgaagaatgtcacagggctcctctccgccttctcagccacagcaaccacgagga

SEQ ID NO: 47 - RNA, 98 nt, synthetic construct
  source 1..98: mol_type = other RNA
ccaccggcccagggcaatgaacacaaagagcatggggggcgtgtcgaagaatgtcacagggctcctctccgccttctcagccacagcaaccactaaga

SEQ ID NO: 48 - RNA, 98 nt, synthetic construct
  source 1..98: mol_type = other RNA
ccaccggcccagggcaatgaacacaaagagcatggggggcgtgtcgaagaatgtcacagggctcctctccgccttctcagccacagcaaccactagga

SEQ ID NO: 49 - RNA, 98 nt, synthetic construct
  source 1..98: mol_type = other RNA
ccaccggcccagggcaatgaacacaaagagcatggggggcgtgtcgaagaatgtcacagggctcctctccgccttctcagccacagcaaccaccagga

SEQ ID NO: 50 - RNA, 99 nt, synthetic construct
  source 1..99: mol_type = other RNA
gccaccggcccagggcaatgaacacaaagagcatggggggcgtgtcgaagaatgtcacagggctcctctccgccttctcagccacagcaaccactaaga

SEQ ID NO: 51 - RNA, 99 nt, synthetic construct
  source 1..99: mol_type = other RNA
gccaccggcccagggcaatgaacacaaagagcatggggggcgtgtcgaagaatgtcacagggctcctctccgccttctcagccacagcaaccacaagga

SEQ ID NO: 52 - RNA, 99 nt, synthetic construct
  source 1..99: mol_type = other RNA
gccaccggcccagggcaatgaacacaaagagcatggggggcgtgtcgaagaatgtcacagggctcctctccgccttctcagccacagcaaccactagga

SEQ ID NO: 53 - RNA, 99 nt, synthetic construct
  source 1..99: mol_type = other RNA
gccaccggcccagggcaatgaacacaaagagcatggggggcgtgtcgaagaatgtcacagggctcctctccgccttctcagccacagcaaccaccagga

SEQ ID NO: 54 - RNA, 99 nt, synthetic construct
  source 1..99: mol_type = other RNA
gccaccggcccagggcaatgaacacaaagagcatggggggcgtgtcgaagaatgtcacagggctcctctccgccttctcagccacagcaaccacgagga

SEQ ID NO: 55 - RNA, 100 nt, synthetic construct
  source 1..100: mol_type = other RNA
agccaccggcccagggcaatgaacacaaagagcatggggggcgtgtcgaagaatgtcacagggctcctctccgccttctcagccacagcaaccaccagga

SEQ ID NO: 56 - RNA, 100 nt, synthetic construct
  source 1..100: mol_type = other RNA
agccaccggcccagggcaatgaacacaaagagcatggggggcgtgtcgaagaatgtcacagggctcctctccgccttctcagccacagcaaccactagga

SEQ ID NO: 57 - RNA, 100 nt, synthetic construct
  source 1..100: mol_type = other RNA
agccaccggcccagggcaatgaacacaaagagcatggggggcgtgtcgaagaatgtcacagggctcctctccgccttctcagccacagcaaccactaaga

SEQ ID NO: 58 - RNA, 100 nt, synthetic construct
  source 1..100: mol_type = other RNA
agccaccggcccagggcaatgaacacaaagagcatggggggcgtgtcgaagaatgtcacagggctcctctccgccttctcagccacagcaaccacaagga

SEQ ID NO: 59 - RNA, 100 nt, synthetic construct
  source 1..100: mol_type = other RNA
agccaccggcccagggcaatgaacacaaagagcatggggggcgtgtcgaagaatgtcacagggctcctctccgccttctcagccacagcaaccacgagga

SEQ ID NO: 60 - RNA, 20 nt, synthetic construct
  source 1..20: mol_type = other RNA
gggctcctctccgccttctc

SEQ ID NO: 61 - RNA, 20 nt, synthetic construct
  source 1..20: mol_type = other RNA
gcgtgtcgaagaatgtcaca

SEQ ID NO: 62 - RNA, 20 nt, synthetic construct
  source 1..20: mol_type = other RNA
ttgccaagtgttccagccac

SEQ ID NO: 63 - RNA, 20 nt, synthetic construct
  source 1..20: mol_type = other RNA
cattgcttatgtttattctc

SEQ ID NO: 64 - RNA, 20 nt, synthetic construct
  source 1..20: mol_type = other RNA
aacacaaagagcatgggggg

SEQ ID NO: 65 - RNA, 20 nt, synthetic construct
  source 1..20: mol_type = other RNA
atggggggcgtgtcgaagaa

SEQ ID NO: 66 - RNA, 20 nt, synthetic construct
  source 1..20: mol_type = other RNA
agccacagcaaccactaaga

SEQ ID NO: 67 - RNA, 20 nt, synthetic construct
  source 1..20: mol_type = other RNA
tctcagccacagcaaccacc

SEQ ID NO: 68 - RNA, 20 nt, synthetic construct
  source 1..20: mol_type = other RNA
ggcaatgaacacaaagagca

SEQ ID NO: 69 - RNA, 20 nt, synthetic construct
  source 1..20: mol_type = other RNA
ctctccgccttctcagccac

SEQ ID NO: 70 - RNA, 20 nt, synthetic construct
  source 1..20: mol_type = other RNA
tgttccagccaccggcccag

SEQ ID NO: 71 - RNA, 20 nt, synthetic construct
  source 1..20: mol_type = other RNA
ctcagccacagcaaccacca

SEQ ID NO: 72 - RNA, 20 nt, synthetic construct
  source 1..20: mol_type = other RNA
tgaacacaaagagcatgggg

SEQ ID NO: 73 - RNA, 20 nt, synthetic construct
  source 1..20: mol_type = other RNA
agccacagcaaccacgagga

SEQ ID NO: 74 - RNA, 20 nt, synthetic construct
  source 1..20: mol_type = other RNA
ctcagccacagcaaccacaa

SEQ ID NO: 75 - RNA, 20 nt, synthetic construct
  source 1..20: mol_type = other RNA
agccacagcaaccaccagga

SEQ ID NO: 76 - RNA, 20 nt, synthetic construct
  source 1..20: mol_type = other RNA
gcaatgaacacaaagagcat

SEQ ID NO: 77 - RNA, 20 nt, synthetic construct
  source 1..20: mol_type = other RNA
cgtgtcgaagaatgtcacag

SEQ ID NO: 78 - RNA, 20 nt, synthetic construct
  source 1..20: mol_type = other RNA
aaagagcatggggggcgtgt

SEQ ID NO: 79 - RNA, 20 nt, synthetic construct
  source 1..20: mol_type = other RNA
cagccaccggcccagggcaa

SEQ ID NO: 80 - RNA, 20 nt, synthetic construct
  source 1..20: mol_type = other RNA
agccacagcaaccacaagga

SEQ ID NO: 81 - RNA, 20 nt, synthetic construct
  source 1..20: mol_type = other RNA
gagcatggggggcgtgtcga

SEQ ID NO: 82 - RNA, 20 nt, synthetic construct
  source 1..20: mol_type = other RNA
ctcagccacagcaaccacga

SEQ ID NO: 83 - RNA, 20 nt, synthetic construct
  source 1..20: mol_type = other RNA
ctcagccacagcaaccacta

SEQ ID NO: 84 - RNA, 20 nt, synthetic construct
  source 1..20: mol_type = other RNA
tgccaagtgttccagccacc

SEQ ID NO: 85 - RNA, 20 nt, synthetic construct
  source 1..20: mol_type = other RNA
atgaacacaaagagcatggg

SEQ ID NO: 86 - RNA, 20 nt, synthetic construct
  source 1..20: mol_type = other RNA
tctcagccacagcaaccaca

SEQ ID NO: 87 - RNA, 20 nt, synthetic construct
  source 1..20: mol_type = other RNA
agccacagcaaccactagga

SEQ ID NO: 88 - RNA, 20 nt, synthetic construct
  source 1..20: mol_type = other RNA
ataaacataagcaatgcttg

SEQ ID NO: 89 - RNA, 20 nt, synthetic construct
  source 1..20: mol_type = other RNA
tctcagccacagcaaccact

SEQ ID NO: 90 - RNA, 20 nt, synthetic construct
  source 1..20: mol_type = other RNA
aatgtcacagggctcctctc

SEQ ID NO: 91 - RNA, 20 nt, synthetic construct
  source 1..20: mol_type = other RNA
ccagggcaatgaacacaaag

SEQ ID NO: 92 - RNA, 20 nt, synthetic construct
  source 1..20: mol_type = other RNA
gtgttccagccaccggccca

SEQ ID NO: 93 - RNA, 20 nt, synthetic construct
  source 1..20: mol_type = other RNA
agtgttccagccaccggccc

SEQ ID NO: 94 - RNA, 20 nt, synthetic construct
  source 1..20: mol_type = other RNA
tctcagccacagcaaccacg

SEQ ID NO: 95 - RNA, 20 nt, synthetic construct
  source 1..20: mol_type = other RNA
aatgaacacaaagagcatgg

SEQ ID NO: 96 - RNA, 20 nt, synthetic construct
  source 1..20: mol_type = other RNA
ggcgtgtcgaagaatgtcac

SEQ ID NO: 97 - RNA, 20 nt, synthetic construct
  source 1..20: mol_type = other RNA
gcccagggcaatgaacacaa

SEQ ID NO: 98 - RNA, 20 nt, synthetic construct
  source 1..20: mol_type = other RNA
caatgaacacaaagagcatg

SEQ ID NO: 99 - RNA, 20 nt, synthetic construct
  source 1..20: mol_type = other RNA
cacaaagagcatggggggcg

SEQ ID NO: 100 - RNA, 96 nt, synthetic construct
  source 1..96: mol_type = other RNA
gcaatgaacacaaagagcatgttttagagctagaaatagcaagttaaaataaggctagtccgttatcaacttgaaaaagtggcaccgagtcggtgc

SEQ ID NO: 101 - RNA, 96 nt, synthetic construct
  source 1..96: mol_type = other RNA
ggcaatgaacacaaagagcagttttagagctagaaatagcaagttaaaataaggctagtccgttatcaacttgaaaaagtggcaccgagtcggtgc

SEQ ID NO: 102 - RNA, 96 nt, synthetic construct
  source 1..96: mol_type = other RNA
ggcgtgtcgaagaatgtcacgttttagagctagaaatagcaagttaaaataaggctagtccgttatcaacttgaaaaagtggcaccgagtcggtgc

SEQ ID NO: 103 - RNA, 96 nt, synthetic construct
  source 1..96: mol_type = other RNA
gtgttccagccaccggcccagttttagagctagaaatagcaagttaaaataaggctagtccgttatcaacttgaaaaagtggcaccgagtcggtgc

SEQ ID NO: 104 - RNA, 96 nt, synthetic construct
  source 1..96: mol_type = other RNA
agtgttccagccaccggcccgttttagagctagaaatagcaagttaaaataaggctagtccgttatcaacttgaaaaagtggcaccgagtcggtgc

SEQ ID NO: 105 - RNA, 96 nt, synthetic construct
  source 1..96: mol_type = other RNA
caatgaacacaaagagcatggttttagagctagaaatagcaagttaaaataaggctagtccgttatcaacttgaaaaagtggcaccgagtcggtgc

SEQ ID NO: 106 - RNA, 96 nt, synthetic construct
  source 1..96: mol_type = other RNA
tctcagccacagcaaccaccgttttagagctagaaatagcaagttaaaataaggctagtccgttatcaacttgaaaaagtggcaccgagtcggtgc

SEQ ID NO: 107 - RNA, 96 nt, synthetic construct
  source 1..96: mol_type = other RNA
ttgccaagtgttccagccacgttttagagctagaaatagcaagttaaaataaggctagtccgttatcaacttgaaaaagtggcaccgagtcggtgc

SEQ ID NO: 108 - RNA, 96 nt, synthetic construct
  source 1..96: mol_type = other RNA
gcgtgtcgaagaatgtcacagttttagagctagaaatagcaagttaaaataaggctagtccgttatcaacttgaaaaagtggcaccgagtcggtgc

SEQ ID NO: 109 - RNA, 96 nt, synthetic construct
  source 1..96: mol_type = other RNA
aatgaacacaaagagcatgggttttagagctagaaatagcaagttaaaataaggctagtccgttatcaacttgaaaaagtggcaccgagtcggtgc

SEQ ID NO: 110 - RNA, 96 nt, synthetic construct
  source 1..96: mol_type = other RNA
atgaacacaaagagcatggggttttagagctagaaatagcaagttaaaataaggctagtccgttatcaacttgaaaaagtggcaccgagtcggtgc

SEQ ID NO: 111 - RNA, 97 nt, synthetic construct
  source 1..97: mol_type = other RNA
gtctcagccacagcaaccaccgttttagagctagaaatagcaagttaaaataaggctagtccgttatcaacttgaaaaagtggcaccgagtcggtgc

SEQ ID NO: 112 - RNA, 97 nt, synthetic construct
  source 1..97: mol_type = other RNA
gaatgaacacaaagagcatgggttttagagctagaaatagcaagttaaaataaggctagtccgttatcaacttgaaaaagtggcaccgagtcggtgc

SEQ ID NO: 113 - RNA, 97 nt, synthetic construct
  source 1..97: mol_type = other RNA
gcaatgaacacaaagagcatggttttagagctagaaatagcaagttaaaataaggctagtccgttatcaacttgaaaaagtggcaccgagtcggtgc

SEQ ID NO: 114 - RNA, 97 nt, synthetic construct
  source 1..97: mol_type = other RNA
gttgccaagtgttccagccacgttttagagctagaaatagcaagttaaaataaggctagtccgttatcaacttgaaaaagtggcaccgagtcggtgc

SEQ ID NO: 115 - RNA, 97 nt, synthetic construct
  source 1..97: mol_type = other RNA
gcattgcttatgtttattctcgttttagagctagaaatagcaagttaaaataaggctagtccgttatcaacttgaaaaagtggcaccgagtcggtgc

SEQ ID NO: 116 - RNA, 97 nt, synthetic construct
  source 1..97: mol_type = other RNA
gataaacataagcaatgcttggttttagagctagaaatagcaagttaaaataaggctagtccgttatcaacttgaaaaagtggcaccgagtcggtgc

SEQ ID NO: 117 - RNA, 97 nt, synthetic construct
  source 1..97: mol_type = other RNA
gagtgttccagccaccggcccgttttagagctagaaatagcaagttaaaataaggctagtccgttatcaacttgaaaaagtggcaccgagtcggtgc

SEQ ID NO: 118 - RNA, 97 nt, synthetic construct
  source 1..97: mol_type = other RNA
gatgaacacaaagagcatggggttttagagctagaaatagcaagttaaaataaggctagtccgttatcaacttgaaaaagtggcaccgagtcggtgc

SEQ ID NO: 119 - RNA, 16 nt, synthetic construct
  source 1..16: mol_type = other RNA
tctctggtcatcctgg

SEQ ID NO: 120 - RNA, 17 nt, synthetic construct
  source 1..17: mol_type = other RNA
ttctctggtcatcctgg

SEQ ID NO: 121 - RNA, 18 nt, synthetic construct
  source 1..18: mol_type = other RNA
attctctggtcatcctgg

SEQ ID NO: 122 - RNA, 19 nt, synthetic construct
  source 1..19: mol_type = other RNA
tattctctggtcatcctgg

SEQ ID NO: 123 - RNA, 20 nt, synthetic construct
  source 1..20: mol_type = other RNA
ttattctctggtcatcctgg

SEQ ID NO: 124 - RNA, 21 nt, synthetic construct
  source 1..21: mol_type = other RNA
tttattctctggtcatcctgg

SEQ ID NO: 125 - RNA, 22 nt, synthetic construct
  source 1..22: mol_type = other RNA
gtttattctctggtcatcctgg

SEQ ID NO: 126-132 - skipped (7 entries)

SEQ ID NO: 133 - RNA, 10 nt, synthetic construct
  source 1..10: mol_type = other RNA
ggatgaccag

SEQ ID NO: 134 - RNA, 11 nt, synthetic construct
  source 1..11: mol_type = other RNA
ggatgaccaga

SEQ ID NO: 135 - RNA, 12 nt, synthetic construct
  source 1..12: mol_type = other RNA
ggatgaccagag

SEQ ID NO: 136 - RNA, 13 nt, synthetic construct
  source 1..13: mol_type = other RNA
ggatgaccagaga

SEQ ID NO: 137 - RNA, 14 nt, synthetic construct
  source 1..14: mol_type = other RNA
ggatgaccagagaa

SEQ ID NO: 138 - RNA, 15 nt, synthetic construct
  source 1..15: mol_type = other RNA
ggatgaccagagaat

SEQ ID NO: 139 - RNA, 16 nt, synthetic construct
  source 1..16: mol_type = other RNA
ggatgaccagagaata

SEQ ID NO: 140 - RNA, 17 nt, synthetic construct
  source 1..17: mol_type = other RNA
ggatgaccagagaataa

SEQ ID NO: 141 - RNA, 18 nt, synthetic construct
  source 1..18: mol_type = other RNA
ggatgaccagagaataaa

SEQ ID NO: 142 - RNA, 19 nt, synthetic construct
  source 1..19: mol_type = other RNA
ggatgaccagagaataaac

SEQ ID NO: 143 - RNA, 91 nt, synthetic construct
  source 1..91: mol_type = other RNA
cggcccagggcaatgaacacaaagagcatggggggcgtgtcgaagaatgtcacagggctcctctccgccttctcagccacagcaacaacca

SEQ ID NO: 144 - RNA, 91 nt, synthetic construct
  source 1..91: mol_type = other RNA
cggcccagggcaatgaacacaaagagcatggggggcgtgtcgaagaatgtcacagggctcctctccgccttctcagccacagcaactacca

SEQ ID NO: 145 - RNA, 91 nt, synthetic construct
  source 1..91: mol_type = other RNA
cggcccagggcaatgaacacaaagagcatggggggcgtgtcgaagaatgtcacagggctcctctccgccttctcagccacagcaaccacca

SEQ ID NO: 146 - RNA, 91 nt, synthetic construct
  source 1..91: mol_type = other RNA
cggcccagggcaatgaacacaaagagcatggggggcgtgtcgaagaatgtcacagggctcctctccgccttctcagccacagcaacgacca

SEQ ID NO: 147 - RNA, 92 nt, synthetic construct
  source 1..92: mol_type = other RNA
ccggcccagggcaatgaacacaaagagcatggggggcgtgtcgaagaatgtcacagggctcctctccgccttctcagccacagcaacgacca

SEQ ID NO: 148 - RNA, 92 nt, synthetic construct
  source 1..92: mol_type = other RNA
ccggcccagggcaatgaacacaaagagcatggggggcgtgtcgaagaatgtcacagggctcctctccgccttctcagccacagcaacaacca

SEQ ID NO: 149 - RNA, 92 nt, synthetic construct
  source 1..92: mol_type = other RNA
ccggcccagggcaatgaacacaaagagcatggggggcgtgtcgaagaatgtcacagggctcctctccgccttctcagccacagcaaccacca

SEQ ID NO: 150 - RNA, 92 nt, synthetic construct
  source 1..92: mol_type = other RNA
ccggcccagggcaatgaacacaaagagcatggggggcgtgtcgaagaatgtcacagggctcctctccgccttctcagccacagcaactacca

SEQ ID NO: 151 - RNA, 93 nt, synthetic construct
  source 1..93: mol_type = other RNA
accggcccagggcaatgaacacaaagagcatggggggcgtgtcgaagaatgtcacagggctcctctccgccttctcagccacagcaacaacca

SEQ ID NO: 152 - RNA, 93 nt, synthetic construct
  source 1..93: mol_type = other RNA
accggcccagggcaatgaacacaaagagcatggggggcgtgtcgaagaatgtcacagggctcctctccgccttctcagccacagcaaccacca

SEQ ID NO: 153 - RNA, 93 nt, synthetic construct
  source 1..93: mol_type = other RNA
accggcccagggcaatgaacacaaagagcatggggggcgtgtcgaagaatgtcacagggctcctctccgccttctcagccacagcaactacca

SEQ ID NO: 154 - RNA, 93 nt, synthetic construct
  source 1..93: mol_type = other RNA
accggcccagggcaatgaacacaaagagcatggggggcgtgtcgaagaatgtcacagggctcctctccgccttctcagccacagcaacgacca

SEQ ID NO: 155 - RNA, 94 nt, synthetic construct
  source 1..94: mol_type = other RNA
caccggcccagggcaatgaacacaaagagcatggggggcgtgtcgaagaatgtcacagggctcctctccgccttctcagccacagcaaccacca

SEQ ID NO: 156 - RNA, 94 nt, synthetic construct
  source 1..94: mol_type = other RNA
caccggcccagggcaatgaacacaaagagcatggggggcgtgtcgaagaatgtcacagggctcctctccgccttctcagccacagcaacaacca

SEQ ID NO: 157 - RNA, 94 nt, synthetic construct
  source 1..94: mol_type = other RNA
caccggcccagggcaatgaacacaaagagcatggggggcgtgtcgaagaatgtcacagggctcctctccgccttctcagccacagcaactacca

SEQ ID NO: 158 - RNA, 94 nt, synthetic construct
  source 1..94: mol_type = other RNA
caccggcccagggcaatgaacacaaagagcatggggggcgtgtcgaagaatgtcacagggctcctctccgccttctcagccacagcaacgacca

SEQ ID NO: 159 - RNA, 95 nt, synthetic construct
  source 1..95: mol_type = other RNA
ccaccggcccagggcaatgaacacaaagagcatggggggcgtgtcgaagaatgtcacagggctcctctccgccttctcagccacagcaacaacca

SEQ ID NO: 160 - RNA, 95 nt, synthetic construct
  source 1..95: mol_type = other RNA
ccaccggcccagggcaatgaacacaaagagcatggggggcgtgtcgaagaatgtcacagggctcctctccgccttctcagccacagcaactacca

SEQ ID NO: 161 - RNA, 95 nt, synthetic construct
  source 1..95: mol_type = other RNA
ccaccggcccagggcaatgaacacaaagagcatggggggcgtgtcgaagaatgtcacagggctcctctccgccttctcagccacagcaaccacca

SEQ ID NO: 162 - RNA, 95 nt, synthetic construct
  source 1..95: mol_type = other RNA
ccaccggcccagggcaatgaacacaaagagcatggggggcgtgtcgaagaatgtcacagggctcctctccgccttctcagccacagcaacgacca

SEQ ID NO: 163 - RNA, 96 nt, synthetic construct
  source 1..96: mol_type = other RNA
gccaccggcccagggcaatgaacacaaagagcatggggggcgtgtcgaagaatgtcacagggctcctctccgccttctcagccacagcaactacca

SEQ ID NO: 164 - RNA, 96 nt, synthetic construct
  source 1..96: mol_type = other RNA
gccaccggcccagggcaatgaacacaaagagcatggggggcgtgtcgaagaatgtcacagggctcctctccgccttctcagccacagcaacgacca

SEQ ID NO: 165 - RNA, 96 nt, synthetic construct
  source 1..96: mol_type = other RNA
gccaccggcccagggcaatgaacacaaagagcatggggggcgtgtcgaagaatgtcacagggctcctctccgccttctcagccacagcaacaacca

SEQ ID NO: 166 - RNA, 96 nt, synthetic construct
  source 1..96: mol_type = other RNA
gccaccggcccagggcaatgaacacaaagagcatggggggcgtgtcgaagaatgtcacagggctcctctccgccttctcagccacagcaaccacca

SEQ ID NO: 167 - RNA, 97 nt, synthetic construct
  source 1..97: mol_type = other RNA
agccaccggcccagggcaatgaacacaaagagcatggggggcgtgtcgaagaatgtcacagggctcctctccgccttctcagccacagcaactacca

SEQ ID NO: 168 - RNA, 97 nt, synthetic construct
  source 1..97: mol_type = other RNA
agccaccggcccagggcaatgaacacaaagagcatggggggcgtgtcgaagaatgtcacagggctcctctccgccttctcagccacagcaacaacca

SEQ ID NO: 169 - RNA, 97 nt, synthetic construct
  source 1..97: mol_type = other RNA
agccaccggcccagggcaatgaacacaaagagcatggggggcgtgtcgaagaatgtcacagggctcctctccgccttctcagccacagcaacgacca

SEQ ID NO: 170 - RNA, 97 nt, synthetic construct
  source 1..97: mol_type = other RNA
agccaccggcccagggcaatgaacacaaagagcatggggggcgtgtcgaagaatgtcacagggctcctctccgccttctcagccacagcaaccacca

SEQ ID NO: 171 - RNA, 98 nt, synthetic construct
  source 1..98: mol_type = other RNA
cagccaccggcccagggcaatgaacacaaagagcatggggggcgtgtcgaagaatgtcacagggctcctctccgccttctcagccacagcaacaacca

SEQ ID NO: 172 - RNA, 98 nt, synthetic construct
  source 1..98: mol_type = other RNA
cagccaccggcccagggcaatgaacacaaagagcatggggggcgtgtcgaagaatgtcacagggctcctctccgccttctcagccacagcaaccacca

SEQ ID NO: 173 - RNA, 98 nt, synthetic construct
  source 1..98: mol_type = other RNA
cagccaccggcccagggcaatgaacacaaagagcatggggggcgtgtcgaagaatgtcacagggctcctctccgccttctcagccacagcaactacca

SEQ ID NO: 174 - RNA, 98 nt, synthetic construct
  source 1..98: mol_type = other RNA
cagccaccggcccagggcaatgaacacaaagagcatggggggcgtgtcgaagaatgtcacagggctcctctccgccttctcagccacagcaacgacca

SEQ ID NO: 175 - RNA, 99 nt, synthetic construct
  source 1..99: mol_type = other RNA
ccagccaccggcccagggcaatgaacacaaagagcatggggggcgtgtcgaagaatgtcacagggctcctctccgccttctcagccacagcaactacca

SEQ ID NO: 176 - RNA, 99 nt, synthetic construct
  source 1..99: mol_type = other RNA
ccagccaccggcccagggcaatgaacacaaagagcatggggggcgtgtcgaagaatgtcacagggctcctctccgccttctcagccacagcaaccacca

SEQ ID NO: 177 - RNA, 99 nt, synthetic construct
  source 1..99: mol_type = other RNA
ccagccaccggcccagggcaatgaacacaaagagcatggggggcgtgtcgaagaatgtcacagggctcctctccgccttctcagccacagcaacaacca

SEQ ID NO: 178 - RNA, 99 nt, synthetic construct
  source 1..99: mol_type = other RNA
ccagccaccggcccagggcaatgaacacaaagagcatggggggcgtgtcgaagaatgtcacagggctcctctccgccttctcagccacagcaacgacca

SEQ ID NO: 179 - RNA, 100 nt, synthetic construct
  source 1..100: mol_type = other RNA
tccagccaccggcccagggcaatgaacacaaagagcatggggggcgtgtcgaagaatgtcacagggctcctctccgccttctcagccacagcaacaacca

SEQ ID NO: 180 - RNA, 100 nt, synthetic construct
  source 1..100: mol_type = other RNA
tccagccaccggcccagggcaatgaacacaaagagcatggggggcgtgtcgaagaatgtcacagggctcctctccgccttctcagccacagcaacgacca

SEQ ID NO: 181 - RNA, 100 nt, synthetic construct
  source 1..100: mol_type = other RNA
tccagccaccggcccagggcaatgaacacaaagagcatggggggcgtgtcgaagaatgtcacagggctcctctccgccttctcagccacagcaactacca

SEQ ID NO: 182 - RNA, 100 nt, synthetic construct
  source 1..100: mol_type = other RNA
tccagccaccggcccagggcaatgaacacaaagagcatggggggcgtgtcgaagaatgtcacagggctcctctccgccttctcagccacagcaaccacca

SEQ ID NO: 183 - RNA, 20 nt, synthetic construct
  source 1..20: mol_type = other RNA
tctcagccacagcaacgacc

SEQ ID NO: 184 - RNA, 20 nt, synthetic construct
  source 1..20: mol_type = other RNA
tctcagccacagcaacaacc

SEQ ID NO: 185 - RNA, 20 nt, synthetic construct
  source 1..20: mol_type = other RNA
ctcagccacagcaacaacca

SEQ ID NO: 186 - RNA, 20 nt, synthetic construct
  source 1..20: mol_type = other RNA
agccacagcaactaccagga

SEQ ID NO: 187 - RNA, 20 nt, synthetic construct
  source 1..20: mol_type = other RNA
tctcagccacagcaactacc

SEQ ID NO: 188 - RNA, 20 nt, synthetic construct
  source 1..20: mol_type = other RNA
ctcagccacagcaactacca

SEQ ID NO: 189 - RNA, 20 nt, synthetic construct
  source 1..20: mol_type = other RNA
ttacctttgccaagtgttcc

SEQ ID NO: 190 - RNA, 20 nt, synthetic construct
  source 1..20: mol_type = other RNA
ctcagccacagcaacgacca

SEQ ID NO: 191 - RNA, 20 nt, synthetic construct
  source 1..20: mol_type = other RNA
agccacagcaacgaccagga

SEQ ID NO: 192 - RNA, 20 nt, synthetic construct
  source 1..20: mol_type = other RNA
agccacagcaacaaccagga

SEQ ID NO: 193 - RNA, 16 nt, synthetic construct
  source 1..16: mol_type = other RNA
atcctggtggttgctg

SEQ ID NO: 194 - RNA, 17 nt, synthetic construct
  source 1..17: mol_type = other RNA
catcctggtggttgctg

SEQ ID NO: 195 - RNA, 18 nt, synthetic construct
  source 1..18: mol_type = other RNA
tcatcctggtggttgctg

SEQ ID NO: 196 - RNA, 19 nt, synthetic construct
  source 1..19: mol_type = other RNA
gtcatcctggtggttgctg

SEQ ID NO: 197 - RNA, 20 nt, synthetic construct
  source 1..20: mol_type = other RNA
ggtcatcctggtggttgctg

SEQ ID NO: 198 - RNA, 21 nt, synthetic construct
  source 1..21: mol_type = other RNA
tggtcatcctggtggttgctg

SEQ ID NO: 199 - RNA, 22 nt, synthetic construct
  source 1..22: mol_type = other RNA
ctggtcatcctggtggttgctg

SEQ ID NO: 200-206 - skipped (7 entries)

SEQ ID NO: 207 - RNA, 10 nt, synthetic construct
  source 1..10: mol_type = other RNA
caaccaccag

SEQ ID NO: 208 - RNA, 11 nt, synthetic construct
  source 1..11: mol_type = other RNA
caaccaccagg

SEQ ID NO: 209 - RNA, 12 nt, synthetic construct
  source 1..12: mol_type = other RNA
caaccaccagga

SEQ ID NO: 210 - RNA, 13 nt, synthetic construct
  source 1..13: mol_type = other RNA
caaccaccaggat

SEQ ID NO: 211 - RNA, 14 nt, synthetic construct
  source 1..14: mol_type = other RNA
caaccaccaggatg

SEQ ID NO: 212 - RNA, 15 nt, synthetic construct
  source 1..15: mol_type = other RNA
caaccaccaggatga

SEQ ID NO: 213 - RNA, 16 nt, synthetic construct
  source 1..16: mol_type = other RNA
caaccaccaggatgac

SEQ ID NO: 214 - RNA, 17 nt, synthetic construct
  source 1..17: mol_type = other RNA
caaccaccaggatgacc

SEQ ID NO: 215 - RNA, 18 nt, synthetic construct
  source 1..18: mol_type = other RNA
caaccaccaggatgacca

SEQ ID NO: 216 - RNA, 19 nt, synthetic construct
  source 1..19: mol_type = other RNA
caaccaccaggatgaccag

SEQ ID NO: 217 - RNA, 82 nt, synthetic construct
  source 1..82: mol_type = other RNA
cggcccagggcaatgaacacaaagagcatggggggcgtgtcgaagaatgtcacagggctcctctccgccttctcagcaacag

SEQ ID NO: 218 - RNA, 82 nt, synthetic construct
  source 1..82: mol_type = other RNA
cggcccagggcaatgaacacaaagagcatggggggcgtgtcgaagaatgtcacagggctcctctccgccttctcagctacag

SEQ ID NO: 219 - RNA, 82 nt, synthetic construct
  source 1..82: mol_type = other RNA
cggcccagggcaatgaacacaaagagcatggggggcgtgtcgaagaatgtcacagggctcctctccgccttctcagcgacag

SEQ ID NO: 220 - RNA, 82 nt, synthetic construct
  source 1..82: mol_type = other RNA
cggcccagggcaatgaacacaaagagcatggggggcgtgtcgaagaatgtcacagggctcctctccgccttctcagccacag

SEQ ID NO: 221 - RNA, 83 nt, synthetic construct
  source 1..83: mol_type = other RNA
ccggcccagggcaatgaacacaaagagcatggggggcgtgtcgaagaatgtcacagggctcctctccgccttctcagcaacag

SEQ ID NO: 222 - RNA, 83 nt, synthetic construct
  source 1..83: mol_type = other RNA
ccggcccagggcaatgaacacaaagagcatggggggcgtgtcgaagaatgtcacagggctcctctccgccttctcagccacag

SEQ ID NO: 223 - RNA, 83 nt, synthetic construct
  source 1..83: mol_type = other RNA
ccggcccagggcaatgaacacaaagagcatggggggcgtgtcgaagaatgtcacagggctcctctccgccttctcagcgacag

SEQ ID NO: 224 - RNA, 83 nt, synthetic construct
  source 1..83: mol_type = other RNA
ccggcccagggcaatgaacacaaagagcatggggggcgtgtcgaagaatgtcacagggctcctctccgccttctcagctacag

SEQ ID NO: 225 - RNA, 84 nt, synthetic construct
  source 1..84: mol_type = other RNA
accggcccagggcaatgaacacaaagagcatggggggcgtgtcgaagaatgtcacagggctcctctccgccttctcagctacag

SEQ ID NO: 226 - RNA, 84 nt, synthetic construct
  source 1..84: mol_type = other RNA
accggcccagggcaatgaacacaaagagcatggggggcgtgtcgaagaatgtcacagggctcctctccgccttctcagcgacag

SEQ ID NO: 227 - RNA, 84 nt, synthetic construct
  source 1..84: mol_type = other RNA
accggcccagggcaatgaacacaaagagcatggggggcgtgtcgaagaatgtcacagggctcctctccgccttctcagcaacag

SEQ ID NO: 228 - RNA, 84 nt, synthetic construct
  source 1..84: mol_type = other RNA
accggcccagggcaatgaacacaaagagcatggggggcgtgtcgaagaatgtcacagggctcctctccgccttctcagccacag

SEQ ID NO: 229 - RNA, 85 nt, synthetic construct
  source 1..85: mol_type = other RNA
caccggcccagggcaatgaacacaaagagcatggggggcgtgtcgaagaatgtcacagggctcctctccgccttctcagcgacag

SEQ ID NO: 230 - RNA, 85 nt, synthetic construct
  source 1..85: mol_type = other RNA
caccggcccagggcaatgaacacaaagagcatggggggcgtgtcgaagaatgtcacagggctcctctccgccttctcagcaacag

SEQ ID NO: 231 - RNA, 85 nt, synthetic construct
  source 1..85: mol_type = other RNA
caccggcccagggcaatgaacacaaagagcatggggggcgtgtcgaagaatgtcacagggctcctctccgccttctcagctacag

SEQ ID NO: 232 - RNA, 85 nt, synthetic construct
  source 1..85: mol_type = other RNA
caccggcccagggcaatgaacacaaagagcatggggggcgtgtcgaagaatgtcacagggctcctctccgccttctcagccacag

SEQ ID NO: 233 - RNA, 86 nt, synthetic construct
  source 1..86: mol_type = other RNA
ccaccggcccagggcaatgaacacaaagagcatggggggcgtgtcgaagaatgtcacagggctcctctccgccttctcagcaacag

SEQ ID NO: 234 - RNA, 86 nt, synthetic construct
  source 1..86: mol_type = other RNA
ccaccggcccagggcaatgaacacaaagagcatggggggcgtgtcgaagaatgtcacagggctcctctccgccttctcagctacag

SEQ ID NO: 235 - RNA, 86 nt, synthetic construct
  source 1..86: mol_type = other RNA
ccaccggcccagggcaatgaacacaaagagcatggggggcgtgtcgaagaatgtcacagggctcctctccgccttctcagcgacag

SEQ ID NO: 236 - RNA, 86 nt, synthetic construct
  source 1..86: mol_type = other RNA
ccaccggcccagggcaatgaacacaaagagcatggggggcgtgtcgaagaatgtcacagggctcctctccgccttctcagccacag

SEQ ID NO: 237 - RNA, 87 nt, synthetic construct
  source 1..87: mol_type = other RNA
gccaccggcccagggcaatgaacacaaagagcatggggggcgtgtcgaagaatgtcacagggctcctctccgccttctcagcaacag

SEQ ID NO: 238 - RNA, 87 nt, synthetic construct
  source 1..87: mol_type = other RNA
gccaccggcccagggcaatgaacacaaagagcatggggggcgtgtcgaagaatgtcacagggctcctctccgccttctcagcgacag

SEQ ID NO: 239 - RNA, 87 nt, synthetic construct
  source 1..87: mol_type = other RNA
gccaccggcccagggcaatgaacacaaagagcatggggggcgtgtcgaagaatgtcacagggctcctctccgccttctcagctacag

SEQ ID NO: 240 - RNA, 87 nt, synthetic construct
  source 1..87: mol_type = other RNA
gccaccggcccagggcaatgaacacaaagagcatggggggcgtgtcgaagaatgtcacagggctcctctccgccttctcagccacag

SEQ ID NO: 241 - RNA, 88 nt, synthetic construct
  source 1..88: mol_type = other RNA
agccaccggcccagggcaatgaacacaaagagcatggggggcgtgtcgaagaatgtcacagggctcctctccgccttctcagccacag

SEQ ID NO: 242 - RNA, 88 nt, synthetic construct
  source 1..88: mol_type = other RNA
agccaccggcccagggcaatgaacacaaagagcatggggggcgtgtcgaagaatgtcacagggctcctctccgccttctcagctacag

SEQ ID NO: 243 - RNA, 88 nt, synthetic construct
  source 1..88: mol_type = other RNA
agccaccggcccagggcaatgaacacaaagagcatggggggcgtgtcgaagaatgtcacagggctcctctccgccttctcagcgacag

SEQ ID NO: 244 - RNA, 88 nt, synthetic construct
  source 1..88: mol_type = other RNA
agccaccggcccagggcaatgaacacaaagagcatggggggcgtgtcgaagaatgtcacagggctcctctccgccttctcagcaacag

SEQ ID NO: 245 - RNA, 89 nt, synthetic construct
  source 1..89: mol_type = other RNA
cagccaccggcccagggcaatgaacacaaagagcatggggggcgtgtcgaagaatgtcacagggctcctctccgccttctcagctacag

SEQ ID NO: 246 - RNA, 89 nt, synthetic construct
  source 1..89: mol_type = other RNA
cagccaccggcccagggcaatgaacacaaagagcatggggggcgtgtcgaagaatgtcacagggctcctctccgccttctcagcaacag

SEQ ID NO: 247 - RNA, 89 nt, synthetic construct
  source 1..89: mol_type = other RNA
cagccaccggcccagggcaatgaacacaaagagcatggggggcgtgtcgaagaatgtcacagggctcctctccgccttctcagccacag

SEQ ID NO: 248 - RNA, 89 nt, synthetic construct
  source 1..89: mol_type = other RNA
cagccaccggcccagggcaatgaacacaaagagcatggggggcgtgtcgaagaatgtcacagggctcctctccgccttctcagcgacag

SEQ ID NO: 249 - RNA, 90 nt, synthetic construct
  source 1..90: mol_type = other RNA
ccagccaccggcccagggcaatgaacacaaagagcatggggggcgtgtcgaagaatgtcacagggctcctctccgccttctcagctacag

SEQ ID NO: 250 - RNA, 90 nt, synthetic construct
  source 1..90: mol_type = other RNA
ccagccaccggcccagggcaatgaacacaaagagcatggggggcgtgtcgaagaatgtcacagggctcctctccgccttctcagcaacag

SEQ ID NO: 251 - RNA, 90 nt, synthetic construct
  source 1..90: mol_type = other RNA
ccagccaccggcccagggcaatgaacacaaagagcatggggggcgtgtcgaagaatgtcacagggctcctctccgccttctcagccacag

SEQ ID NO: 252 - RNA, 90 nt, synthetic construct
  source 1..90: mol_type = other RNA
ccagccaccggcccagggcaatgaacacaaagagcatggggggcgtgtcgaagaatgtcacagggctcctctccgccttctcagcgacag

SEQ ID NO: 253 - RNA, 91 nt, synthetic construct
  source 1..91: mol_type = other RNA
tccagccaccggcccagggcaatgaacacaaagagcatggggggcgtgtcgaagaatgtcacagggctcctctccgccttctcagccacag

SEQ ID NO: 254 - RNA, 91 nt, synthetic construct
  source 1..91: mol_type = other RNA
tccagccaccggcccagggcaatgaacacaaagagcatggggggcgtgtcgaagaatgtcacagggctcctctccgccttctcagcaacag

SEQ ID NO: 255 - RNA, 91 nt, synthetic construct
  source 1..91: mol_type = other RNA
tccagccaccggcccagggcaatgaacacaaagagcatggggggcgtgtcgaagaatgtcacagggctcctctccgccttctcagcgacag

SEQ ID NO: 256 - RNA, 91 nt, synthetic construct
  source 1..91: mol_type = other RNA
tccagccaccggcccagggcaatgaacacaaagagcatggggggcgtgtcgaagaatgtcacagggctcctctccgccttctcagctacag

SEQ ID NO: 257 - RNA, 92 nt, synthetic construct
  source 1..92: mol_type = other RNA
ttccagccaccggcccagggcaatgaacacaaagagcatggggggcgtgtcgaagaatgtcacagggctcctctccgccttctcagccacag

SEQ ID NO: 258 - RNA, 92 nt, synthetic construct
  source 1..92: mol_type = other RNA
ttccagccaccggcccagggcaatgaacacaaagagcatggggggcgtgtcgaagaatgtcacagggctcctctccgccttctcagcaacag

SEQ ID NO: 259 - RNA, 92 nt, synthetic construct
  source 1..92: mol_type = other RNA
ttccagccaccggcccagggcaatgaacacaaagagcatggggggcgtgtcgaagaatgtcacagggctcctctccgccttctcagctacag

SEQ ID NO: 260 - RNA, 92 nt, synthetic construct
  source 1..92: mol_type = other RNA
ttccagccaccggcccagggcaatgaacacaaagagcatggggggcgtgtcgaagaatgtcacagggctcctctccgccttctcagcgacag

SEQ ID NO: 261 - RNA, 93 nt, synthetic construct
  source 1..93: mol_type = other RNA
gttccagccaccggcccagggcaatgaacacaaagagcatggggggcgtgtcgaagaatgtcacagggctcctctccgccttctcagcgacag

SEQ ID NO: 262 - RNA, 93 nt, synthetic construct
  source 1..93: mol_type = other RNA
gttccagccaccggcccagggcaatgaacacaaagagcatggggggcgtgtcgaagaatgtcacagggctcctctccgccttctcagccacag

SEQ ID NO: 263 - RNA, 93 nt, synthetic construct
  source 1..93: mol_type = other RNA
gttccagccaccggcccagggcaatgaacacaaagagcatggggggcgtgtcgaagaatgtcacagggctcctctccgccttctcagctacag

SEQ ID NO: 264 - RNA, 93 nt, synthetic construct
  source 1..93: mol_type = other RNA
gttccagccaccggcccagggcaatgaacacaaagagcatggggggcgtgtcgaagaatgtcacagggctcctctccgccttctcagcaacag

SEQ ID NO: 265 - RNA, 94 nt, synthetic construct
  source 1..94: mol_type = other RNA
tgttccagccaccggcccagggcaatgaacacaaagagcatggggggcgtgtcgaagaatgtcacagggctcctctccgccttctcagcgacag

SEQ ID NO: 266 - RNA, 94 nt, synthetic construct
  source 1..94: mol_type = other RNA
tgttccagccaccggcccagggcaatgaacacaaagagcatggggggcgtgtcgaagaatgtcacagggctcctctccgccttctcagcaacag

SEQ ID NO: 267 - RNA, 94 nt, synthetic construct
  source 1..94: mol_type = other RNA
tgttccagccaccggcccagggcaatgaacacaaagagcatggggggcgtgtcgaagaatgtcacagggctcctctccgccttctcagctacag

SEQ ID NO: 268 - RNA, 94 nt, synthetic construct
  source 1..94: mol_type = other RNA
tgttccagccaccggcccagggcaatgaacacaaagagcatggggggcgtgtcgaagaatgtcacagggctcctctccgccttctcagccacag

SEQ ID NO: 269 - RNA, 95 nt, synthetic construct
  source 1..95: mol_type = other RNA
gtgttccagccaccggcccagggcaatgaacacaaagagcatggggggcgtgtcgaagaatgtcacagggctcctctccgccttctcagccacag

SEQ ID NO: 270 - RNA, 95 nt, synthetic construct
  source 1..95: mol_type = other RNA
gtgttccagccaccggcccagggcaatgaacacaaagagcatggggggcgtgtcgaagaatgtcacagggctcctctccgccttctcagcaacag

SEQ ID NO: 271 - RNA, 95 nt, synthetic construct
  source 1..95: mol_type = other RNA
gtgttccagccaccggcccagggcaatgaacacaaagagcatggggggcgtgtcgaagaatgtcacagggctcctctccgccttctcagcgacag

SEQ ID NO: 272 - RNA, 95 nt, synthetic construct
  source 1..95: mol_type = other RNA
gtgttccagccaccggcccagggcaatgaacacaaagagcatggggggcgtgtcgaagaatgtcacagggctcctctccgccttctcagctacag

SEQ ID NO: 273 - RNA, 96 nt, synthetic construct
  source 1..96: mol_type = other RNA
agtgttccagccaccggcccagggcaatgaacacaaagagcatggggggcgtgtcgaagaatgtcacagggctcctctccgccttctcagcgacag

SEQ ID NO: 274 - RNA, 96 nt, synthetic construct
  source 1..96: mol_type = other RNA
agtgttccagccaccggcccagggcaatgaacacaaagagcatggggggcgtgtcgaagaatgtcacagggctcctctccgccttctcagcaacag

SEQ ID NO: 275 - RNA, 96 nt, synthetic construct
  source 1..96: mol_type = other RNA
agtgttccagccaccggcccagggcaatgaacacaaagagcatggggggcgtgtcgaagaatgtcacagggctcctctccgccttctcagctacag

SEQ ID NO: 276 - RNA, 96 nt, synthetic construct
  source 1..96: mol_type = other RNA
agtgttccagccaccggcccagggcaatgaacacaaagagcatggggggcgtgtcgaagaatgtcacagggctcctctccgccttctcagccacag

SEQ ID NO: 277 - RNA, 97 nt, synthetic construct
  source 1..97: mol_type = other RNA
aagtgttccagccaccggcccagggcaatgaacacaaagagcatggggggcgtgtcgaagaatgtcacagggctcctctccgccttctcagctacag

SEQ ID NO: 278 - RNA, 97 nt, synthetic construct
  source 1..97: mol_type = other RNA
aagtgttccagccaccggcccagggcaatgaacacaaagagcatggggggcgtgtcgaagaatgtcacagggctcctctccgccttctcagcaacag

SEQ ID NO: 279 - RNA, 97 nt, synthetic construct
  source 1..97: mol_type = other RNA
aagtgttccagccaccggcccagggcaatgaacacaaagagcatggggggcgtgtcgaagaatgtcacagggctcctctccgccttctcagcgacag

SEQ ID NO: 280 - RNA, 97 nt, synthetic construct
  source 1..97: mol_type = other RNA
aagtgttccagccaccggcccagggcaatgaacacaaagagcatggggggcgtgtcgaagaatgtcacagggctcctctccgccttctcagccacag

SEQ ID NO: 281 - RNA, 98 nt, synthetic construct
  source 1..98: mol_type = other RNA
caagtgttccagccaccggcccagggcaatgaacacaaagagcatggggggcgtgtcgaagaatgtcacagggctcctctccgccttctcagcgacag

SEQ ID NO: 282 - RNA, 98 nt, synthetic construct
  source 1..98: mol_type = other RNA
caagtgttccagccaccggcccagggcaatgaacacaaagagcatggggggcgtgtcgaagaatgtcacagggctcctctccgccttctcagctacag

SEQ ID NO: 283 - RNA, 98 nt, synthetic construct
  source 1..98: mol_type = other RNA
caagtgttccagccaccggcccagggcaatgaacacaaagagcatggggggcgtgtcgaagaatgtcacagggctcctctccgccttctcagcaacag

SEQ ID NO: 284 - RNA, 98 nt, synthetic construct
  source 1..98: mol_type = other RNA
caagtgttccagccaccggcccagggcaatgaacacaaagagcatggggggcgtgtcgaagaatgtcacagggctcctctccgccttctcagccacag

SEQ ID NO: 285 - RNA, 99 nt, synthetic construct
  source 1..99: mol_type = other RNA
ccaagtgttccagccaccggcccagggcaatgaacacaaagagcatggggggcgtgtcgaagaatgtcacagggctcctctccgccttctcagctacag

SEQ ID NO: 286 - RNA, 99 nt, synthetic construct
  source 1..99: mol_type = other RNA
ccaagtgttccagccaccggcccagggcaatgaacacaaagagcatggggggcgtgtcgaagaatgtcacagggctcctctccgccttctcagcaacag

SEQ ID NO: 287 - RNA, 99 nt, synthetic construct
  source 1..99: mol_type = other RNA
ccaagtgttccagccaccggcccagggcaatgaacacaaagagcatggggggcgtgtcgaagaatgtcacagggctcctctccgccttctcagccacag

SEQ ID NO: 288 - RNA, 99 nt, synthetic construct
  source 1..99: mol_type = other RNA
ccaagtgttccagccaccggcccagggcaatgaacacaaagagcatggggggcgtgtcgaagaatgtcacagggctcctctccgccttctcagcgacag

SEQ ID NO: 289 - RNA, 100 nt, synthetic construct
  source 1..100: mol_type = other RNA
gccaagtgttccagccaccggcccagggcaatgaacacaaagagcatggggggcgtgtcgaagaatgtcacagggctcctctccgccttctcagccacag

SEQ ID NO: 290 - RNA, 100 nt, synthetic construct
  source 1..100: mol_type = other RNA
gccaagtgttccagccaccggcccagggcaatgaacacaaagagcatggggggcgtgtcgaagaatgtcacagggctcctctccgccttctcagcaacag

SEQ ID NO: 291 - RNA, 100 nt, synthetic construct
  source 1..100: mol_type = other RNA
gccaagtgttccagccaccggcccagggcaatgaacacaaagagcatggggggcgtgtcgaagaatgtcacagggctcctctccgccttctcagctacag

SEQ ID NO: 292 - RNA, 100 nt, synthetic construct
  source 1..100: mol_type = other RNA
gccaagtgttccagccaccggcccagggcaatgaacacaaagagcatggggggcgtgtcgaagaatgtcacagggctcctctccgccttctcagcgacag

SEQ ID NO: 293 - RNA, 20 nt, synthetic construct
  source 1..20: mol_type = other RNA
agctgctgttacctttgcca

SEQ ID NO: 294 - RNA, 20 nt, synthetic construct
  source 1..20: mol_type = other RNA
ctgctgttacctttgccaag

SEQ ID NO: 295 - RNA, 20 nt, synthetic construct
  source 1..20: mol_type = other RNA
ctctccgccttctcagcgac

SEQ ID NO: 296 - RNA, 20 nt, synthetic construct
  source 1..20: mol_type = other RNA
ctctccgccttctcagctac

SEQ ID NO: 297 - RNA, 20 nt, synthetic construct
  source 1..20: mol_type = other RNA
ctctccgccttctcagcaac

SEQ ID NO: 298 - RNA, 16 nt, synthetic construct
  source 1..16: mol_type = other RNA
gttgctgtggctgaga

SEQ ID NO: 299 - RNA, 17 nt, synthetic construct
  source 1..17: mol_type = other RNA
ggttgctgtggctgaga

SEQ ID NO: 300 - RNA, 18 nt, synthetic construct
  source 1..18: mol_type = other RNA
tggttgctgtggctgaga

SEQ ID NO: 301 - RNA, 19 nt, synthetic construct
  source 1..19: mol_type = other RNA
gtggttgctgtggctgaga

SEQ ID NO: 302 - RNA, 20 nt, synthetic construct
  source 1..20: mol_type = other RNA
ggtggttgctgtggctgaga

SEQ ID NO: 303 - RNA, 21 nt, synthetic construct
  source 1..21: mol_type = other RNA
tggtggttgctgtggctgaga

SEQ ID NO: 304 - RNA, 22 nt, synthetic construct
  source 1..22: mol_type = other RNA
ctggtggttgctgtggctgaga

SEQ ID NO: 305-311 - skipped (7 entries)

SEQ ID NO: 312 - RNA, 10 nt, synthetic construct
  source 1..10: mol_type = other RNA
cagccacagc

SEQ ID NO: 313 - RNA, 11 nt, synthetic construct
  source 1..11: mol_type = other RNA
cagccacagca

SEQ ID NO: 314 - RNA, 12 nt, synthetic construct
  source 1..12: mol_type = other RNA
cagccacagcaa

SEQ ID NO: 315 - RNA, 13 nt, synthetic construct
  source 1..13: mol_type = other RNA
cagccacagcaac

SEQ ID NO: 316 - RNA, 14 nt, synthetic construct
  source 1..14: mol_type = other RNA
cagccacagcaacc

SEQ ID NO: 317 - RNA, 15 nt, synthetic construct
  source 1..15: mol_type = other RNA
cagccacagcaacca

SEQ ID NO: 318 - RNA, 16 nt, synthetic construct
  source 1..16: mol_type = other RNA
cagccacagcaaccac

SEQ ID NO: 319 - RNA, 17 nt, synthetic construct
  source 1..17: mol_type = other RNA
cagccacagcaaccacc

SEQ ID NO: 320 - RNA, 18 nt, synthetic construct
  source 1..18: mol_type = other RNA
cagccacagcaaccacca

SEQ ID NO: 321 - RNA, 19 nt, synthetic construct
  source 1..19: mol_type = other RNA
cagccacagcaaccaccag

SEQ ID NO: 322 - RNA, 73 nt, synthetic construct
  source 1..73: mol_type = other RNA
cggcccagggcaatgaacacaaagagcatggggggcgtgtcgaagaatgtcacagggctcctctccgccttct

SEQ ID NO: 323 - RNA, 73 nt, synthetic construct
  source 1..73: mol_type = other RNA
cggcccagggcaatgaacacaaagagcatggggggcgtgtcgaagaatgtcacagggctcctctccgctttct

SEQ ID NO: 324 - RNA, 74 nt, synthetic construct
  source 1..74: mol_type = other RNA
ccggcccagggcaatgaacacaaagagcatggggggcgtgtcgaagaatgtcacagggctcctctccgccttct

SEQ ID NO: 325 - RNA, 74 nt, synthetic construct
  source 1..74: mol_type = other RNA
ccggcccagggcaatgaacacaaagagcatggggggcgtgtcgaagaatgtcacagggctcctctccgctttct

SEQ ID NO: 326 - RNA, 75 nt, synthetic construct
  source 1..75: mol_type = other RNA
accggcccagggcaatgaacacaaagagcatggggggcgtgtcgaagaatgtcacagggctcctctccgccttct

SEQ ID NO: 327 - RNA, 75 nt, synthetic construct
  source 1..75: mol_type = other RNA
accggcccagggcaatgaacacaaagagcatggggggcgtgtcgaagaatgtcacagggctcctctccgctttct

SEQ ID NO: 328 - RNA, 76 nt, synthetic construct
  source 1..76: mol_type = other RNA
caccggcccagggcaatgaacacaaagagcatggggggcgtgtcgaagaatgtcacagggctcctctccgctttct

SEQ ID NO: 329 - RNA, 76 nt, synthetic construct
  source 1..76: mol_type = other RNA
caccggcccagggcaatgaacacaaagagcatggggggcgtgtcgaagaatgtcacagggctcctctccgccttct

SEQ ID NO: 330 - RNA, 77 nt, synthetic construct
  source 1..77: mol_type = other RNA
ccaccggcccagggcaatgaacacaaagagcatggggggcgtgtcgaagaatgtcacagggctcctctccgccttct

SEQ ID NO: 331 - RNA, 77 nt, synthetic construct
  source 1..77: mol_type = other RNA
ccaccggcccagggcaatgaacacaaagagcatggggggcgtgtcgaagaatgtcacagggctcctctccgctttct

SEQ ID NO: 332 - RNA, 78 nt, synthetic construct
  source 1..78: mol_type = other RNA
gccaccggcccagggcaatgaacacaaagagcatggggggcgtgtcgaagaatgtcacagggctcctctccgctttct

SEQ ID NO: 333 - RNA, 78 nt, synthetic construct
  source 1..78: mol_type = other RNA
gccaccggcccagggcaatgaacacaaagagcatggggggcgtgtcgaagaatgtcacagggctcctctccgccttct

SEQ ID NO: 334 - RNA, 79 nt, synthetic construct
  source 1..79: mol_type = other RNA
agccaccggcccagggcaatgaacacaaagagcatggggggcgtgtcgaagaatgtcacagggctcctctccgccttct

SEQ ID NO: 335 - RNA, 79 nt, synthetic construct
  source 1..79: mol_type = other RNA
agccaccggcccagggcaatgaacacaaagagcatggggggcgtgtcgaagaatgtcacagggctcctctccgctttct

SEQ ID NO: 336 - RNA, 80 nt, synthetic construct
  source 1..80: mol_type = other RNA
cagccaccggcccagggcaatgaacacaaagagcatggggggcgtgtcgaagaatgtcacagggctcctctccgctttct

SEQ ID NO: 337 - RNA, 80 nt, synthetic construct
  source 1..80: mol_type = other RNA
cagccaccggcccagggcaatgaacacaaagagcatggggggcgtgtcgaagaatgtcacagggctcctctccgccttct

SEQ ID NO: 338 - RNA, 81 nt, synthetic construct
  source 1..81: mol_type = other RNA
ccagccaccggcccagggcaatgaacacaaagagcatggggggcgtgtcgaagaatgtcacagggctcctctccgccttct

SEQ ID NO: 339 - RNA, 81 nt, synthetic construct
  source 1..81: mol_type = other RNA
ccagccaccggcccagggcaatgaacacaaagagcatggggggcgtgtcgaagaatgtcacagggctcctctccgctttct

SEQ ID NO: 340 - RNA, 82 nt, synthetic construct
  source 1..82: mol_type = other RNA
tccagccaccggcccagggcaatgaacacaaagagcatggggggcgtgtcgaagaatgtcacagggctcctctccgccttct

SEQ ID NO: 341 - RNA, 82 nt, synthetic construct
  source 1..82: mol_type = other RNA
tccagccaccggcccagggcaatgaacacaaagagcatggggggcgtgtcgaagaatgtcacagggctcctctccgctttct

SEQ ID NO: 342 - RNA, 83 nt, synthetic construct
  source 1..83: mol_type = other RNA
ttccagccaccggcccagggcaatgaacacaaagagcatggggggcgtgtcgaagaatgtcacagggctcctctccgccttct

SEQ ID NO: 343 - RNA, 83 nt, synthetic construct
  source 1..83: mol_type = other RNA
ttccagccaccggcccagggcaatgaacacaaagagcatggggggcgtgtcgaagaatgtcacagggctcctctccgctttct

SEQ ID NO: 344 - RNA, 84 nt, synthetic construct
  source 1..84: mol_type = other RNA
gttccagccaccggcccagggcaatgaacacaaagagcatggggggcgtgtcgaagaatgtcacagggctcctctccgccttct

SEQ ID NO: 345 - RNA, 84 nt, synthetic construct
  source 1..84: mol_type = other RNA
gttccagccaccggcccagggcaatgaacacaaagagcatggggggcgtgtcgaagaatgtcacagggctcctctccgctttct

SEQ ID NO: 346 - RNA, 85 nt, synthetic construct
  source 1..85: mol_type = other RNA
tgttccagccaccggcccagggcaatgaacacaaagagcatggggggcgtgtcgaagaatgtcacagggctcctctccgctttct

SEQ ID NO: 347 - RNA, 85 nt, synthetic construct
  source 1..85: mol_type = other RNA
tgttccagccaccggcccagggcaatgaacacaaagagcatggggggcgtgtcgaagaatgtcacagggctcctctccgccttct

SEQ ID NO: 348 - RNA, 86 nt, synthetic construct
  source 1..86: mol_type = other RNA
gtgttccagccaccggcccagggcaatgaacacaaagagcatggggggcgtgtcgaagaatgtcacagggctcctctccgctttct

SEQ ID NO: 349 - RNA, 86 nt, synthetic construct
  source 1..86: mol_type = other RNA
gtgttccagccaccggcccagggcaatgaacacaaagagcatggggggcgtgtcgaagaatgtcacagggctcctctccgccttct

SEQ ID NO: 350 - RNA, 87 nt, synthetic construct
  source 1..87: mol_type = other RNA
agtgttccagccaccggcccagggcaatgaacacaaagagcatggggggcgtgtcgaagaatgtcacagggctcctctccgccttct

SEQ ID NO: 351 - RNA, 87 nt, synthetic construct
  source 1..87: mol_type = other RNA
agtgttccagccaccggcccagggcaatgaacacaaagagcatggggggcgtgtcgaagaatgtcacagggctcctctccgctttct

SEQ ID NO: 352 - RNA, 88 nt, synthetic construct
  source 1..88: mol_type = other RNA
aagtgttccagccaccggcccagggcaatgaacacaaagagcatggggggcgtgtcgaagaatgtcacagggctcctctccgccttct

SEQ ID NO: 353 - RNA, 88 nt, synthetic construct
  source 1..88: mol_type = other RNA
aagtgttccagccaccggcccagggcaatgaacacaaagagcatggggggcgtgtcgaagaatgtcacagggctcctctccgctttct

SEQ ID NO: 354 - RNA, 89 nt, synthetic construct
  source 1..89: mol_type = other RNA
caagtgttccagccaccggcccagggcaatgaacacaaagagcatggggggcgtgtcgaagaatgtcacagggctcctctccgctttct

SEQ ID NO: 355 - RNA, 89 nt, synthetic construct
  source 1..89: mol_type = other RNA
caagtgttccagccaccggcccagggcaatgaacacaaagagcatggggggcgtgtcgaagaatgtcacagggctcctctccgccttct

SEQ ID NO: 356 - RNA, 90 nt, synthetic construct
  source 1..90: mol_type = other RNA
ccaagtgttccagccaccggcccagggcaatgaacacaaagagcatggggggcgtgtcgaagaatgtcacagggctcctctccgccttct

SEQ ID NO: 357 - RNA, 90 nt, synthetic construct
  source 1..90: mol_type = other RNA
ccaagtgttccagccaccggcccagggcaatgaacacaaagagcatggggggcgtgtcgaagaatgtcacagggctcctctccgctttct

SEQ ID NO: 358 - RNA, 91 nt, synthetic construct
  source 1..91: mol_type = other RNA
gccaagtgttccagccaccggcccagggcaatgaacacaaagagcatggggggcgtgtcgaagaatgtcacagggctcctctccgctttct

SEQ ID NO: 359 - RNA, 91 nt, synthetic construct
  source 1..91: mol_type = other RNA
gccaagtgttccagccaccggcccagggcaatgaacacaaagagcatggggggcgtgtcgaagaatgtcacagggctcctctccgccttct

SEQ ID NO: 360 - RNA, 92 nt, synthetic construct
  source 1..92: mol_type = other RNA
tgccaagtgttccagccaccggcccagggcaatgaacacaaagagcatggggggcgtgtcgaagaatgtcacagggctcctctccgctttct

SEQ ID NO: 361 - RNA, 92 nt, synthetic construct
  source 1..92: mol_type = other RNA
tgccaagtgttccagccaccggcccagggcaatgaacacaaagagcatggggggcgtgtcgaagaatgtcacagggctcctctccgccttct

SEQ ID NO: 362 - RNA, 93 nt, synthetic construct
  source 1..93: mol_type = other RNA
ttgccaagtgttccagccaccggcccagggcaatgaacacaaagagcatggggggcgtgtcgaagaatgtcacagggctcctctccgctttct

SEQ ID NO: 363 - RNA, 93 nt, synthetic construct
  source 1..93: mol_type = other RNA
ttgccaagtgttccagccaccggcccagggcaatgaacacaaagagcatggggggcgtgtcgaagaatgtcacagggctcctctccgccttct

SEQ ID NO: 364 - RNA, 94 nt, synthetic construct
  source 1..94: mol_type = other RNA
tttgccaagtgttccagccaccggcccagggcaatgaacacaaagagcatggggggcgtgtcgaagaatgtcacagggctcctctccgccttct

SEQ ID NO: 365 - RNA, 94 nt, synthetic construct
  source 1..94: mol_type = other RNA
tttgccaagtgttccagccaccggcccagggcaatgaacacaaagagcatggggggcgtgtcgaagaatgtcacagggctcctctccgctttct

SEQ ID NO: 366 - RNA, 95 nt, synthetic construct
  source 1..95: mol_type = other RNA
ctttgccaagtgttccagccaccggcccagggcaatgaacacaaagagcatggggggcgtgtcgaagaatgtcacagggctcctctccgccttct

SEQ ID NO: 367 - RNA, 95 nt, synthetic construct
  source 1..95: mol_type = other RNA
ctttgccaagtgttccagccaccggcccagggcaatgaacacaaagagcatggggggcgtgtcgaagaatgtcacagggctcctctccgctttct

SEQ ID NO: 368 - RNA, 96 nt, synthetic construct
  source 1..96: mol_type = other RNA
cctttgccaagtgttccagccaccggcccagggcaatgaacacaaagagcatggggggcgtgtcgaagaatgtcacagggctcctctccgccttct

SEQ ID NO: 369 - RNA, 96 nt, synthetic construct
  source 1..96: mol_type = other RNA
cctttgccaagtgttccagccaccggcccagggcaatgaacacaaagagcatggggggcgtgtcgaagaatgtcacagggctcctctccgctttct

SEQ ID NO: 370 - RNA, 97 nt, synthetic construct
  source 1..97: mol_type = other RNA
acctttgccaagtgttccagccaccggcccagggcaatgaacacaaagagcatggggggcgtgtcgaagaatgtcacagggctcctctccgccttct

SEQ ID NO: 371 - RNA, 97 nt, synthetic construct
  source 1..97: mol_type = other RNA
acctttgccaagtgttccagccaccggcccagggcaatgaacacaaagagcatggggggcgtgtcgaagaatgtcacagggctcctctccgctttct

SEQ ID NO: 372 - RNA, 98 nt, synthetic construct
  source 1..98: mol_type = other RNA
tacctttgccaagtgttccagccaccggcccagggcaatgaacacaaagagcatggggggcgtgtcgaagaatgtcacagggctcctctccgctttct

SEQ ID NO: 373 - RNA, 98 nt, synthetic construct
  source 1..98: mol_type = other RNA
tacctttgccaagtgttccagccaccggcccagggcaatgaacacaaagagcatggggggcgtgtcgaagaatgtcacagggctcctctccgccttct

SEQ ID NO: 374 - RNA, 99 nt, synthetic construct
  source 1..99: mol_type = other RNA
ttacctttgccaagtgttccagccaccggcccagggcaatgaacacaaagagcatggggggcgtgtcgaagaatgtcacagggctcctctccgccttct

SEQ ID NO: 375 - RNA, 99 nt, synthetic construct
  source 1..99: mol_type = other RNA
ttacctttgccaagtgttccagccaccggcccagggcaatgaacacaaagagcatggggggcgtgtcgaagaatgtcacagggctcctctccgctttct

SEQ ID NO: 376 - RNA, 100 nt, synthetic construct
  source 1..100: mol_type = other RNA
gttacctttgccaagtgttccagccaccggcccagggcaatgaacacaaagagcatggggggcgtgtcgaagaatgtcacagggctcctctccgctttct

SEQ ID NO: 377 - RNA, 100 nt, synthetic construct
  source 1..100: mol_type = other RNA
gttacctttgccaagtgttccagccaccggcccagggcaatgaacacaaagagcatggggggcgtgtcgaagaatgtcacagggctcctctccgccttct

SEQ ID NO: 378 - RNA, 20 nt, synthetic construct
  source 1..20: mol_type = other RNA
cctgaagctgctgttacctt

SEQ ID NO: 379 - RNA, 20 nt, synthetic construct
  source 1..20: mol_type = other RNA
gggctcctctccgctttctc

SEQ ID NO: 380 - RNA, 16 nt, synthetic construct
  source 1..16: mol_type = other RNA
gctgtggctgagaagg

SEQ ID NO: 381 - RNA, 17 nt, synthetic construct
  source 1..17: mol_type = other RNA
tgctgtggctgagaagg

SEQ ID NO: 382 - RNA, 18 nt, synthetic construct
  source 1..18: mol_type = other RNA
ttgctgtggctgagaagg

SEQ ID NO: 383 - RNA, 19 nt, synthetic construct
  source 1..19: mol_type = other RNA
gttgctgtggctgagaagg

SEQ ID NO: 384 - RNA, 20 nt, synthetic construct
  source 1..20: mol_type = other RNA
ggttgctgtggctgagaagg

SEQ ID NO: 385 - RNA, 21 nt, synthetic construct
  source 1..21: mol_type = other RNA
tggttgctgtggctgagaagg

SEQ ID NO: 386 - RNA, 22 nt, synthetic construct
  source 1..22: mol_type = other RNA
gtggttgctgtggctgagaagg

SEQ ID NO: 387-393 - skipped (7 entries)

SEQ ID NO: 394 - RNA, 10 nt, synthetic construct
  source 1..10: mol_type = other RNA
tctcagccac

SEQ ID NO: 395 - RNA, 11 nt, synthetic construct
  source 1..11: mol_type = other RNA
tctcagccaca

SEQ ID NO: 396 - RNA, 12 nt, synthetic construct
  source 1..12: mol_type = other RNA
tctcagccacag

SEQ ID NO: 397 - RNA, 13 nt, synthetic construct
  source 1..13: mol_type = other RNA
tctcagccacagc

SEQ ID NO: 398 - RNA, 14 nt, synthetic construct
  source 1..14: mol_type = other RNA
tctcagccacagca

SEQ ID NO: 399 - RNA, 15 nt, synthetic construct
  source 1..15: mol_type = other RNA
tctcagccacagcaa

SEQ ID NO: 400 - RNA, 16 nt, synthetic construct
  source 1..16: mol_type = other RNA
tctcagccacagcaac

SEQ ID NO: 401 - RNA, 17 nt, synthetic construct
  source 1..17: mol_type = other RNA
tctcagccacagcaacc

SEQ ID NO: 402 - RNA, 18 nt, synthetic construct
  source 1..18: mol_type = other RNA
tctcagccacagcaacca

SEQ ID NO: 403 - RNA, 19 nt, synthetic construct
  source 1..19: mol_type = other RNA
tctcagccacagcaaccac

SEQ ID NO: 404 - RNA, 70 nt, synthetic construct
  source 1..70: mol_type = other RNA
cggcccagggcaatgaacacaaagagcatggggggcgtgtcgaagaatgtcacagggctcctctcagcct

SEQ ID NO: 405 - RNA, 70 nt, synthetic construct
  source 1..70: mol_type = other RNA
cggcccagggcaatgaacacaaagagcatggggggcgtgtcgaagaatgtcacagggctcctctctgcct

SEQ ID NO: 406 - RNA, 70 nt, synthetic construct
  source 1..70: mol_type = other RNA
cggcccagggcaatgaacacaaagagcatggggggcgtgtcgaagaatgtcacagggctcctctcggcct

SEQ ID NO: 407 - RNA, 70 nt, synthetic construct
  source 1..70: mol_type = other RNA
cggcccagggcaatgaacacaaagagcatggggggcgtgtcgaagaatgtcacagggctcctctccgcct

SEQ ID NO: 408 - RNA, 71 nt, synthetic construct
  source 1..71: mol_type = other RNA
ccggcccagggcaatgaacacaaagagcatggggggcgtgtcgaagaatgtcacagggctcctctcagcct

SEQ ID NO: 409 - RNA, 71 nt, synthetic construct
  source 1..71: mol_type = other RNA
ccggcccagggcaatgaacacaaagagcatggggggcgtgtcgaagaatgtcacagggctcctctccgcct

SEQ ID NO: 410 - RNA, 71 nt, synthetic construct
  source 1..71: mol_type = other RNA
ccggcccagggcaatgaacacaaagagcatggggggcgtgtcgaagaatgtcacagggctcctctcggcct

SEQ ID NO: 411 - RNA, 71 nt, synthetic construct
  source 1..71: mol_type = other RNA
ccggcccagggcaatgaacacaaagagcatggggggcgtgtcgaagaatgtcacagggctcctctctgcct

SEQ ID NO: 412 - RNA, 72 nt, synthetic construct
  source 1..72: mol_type = other RNA
accggcccagggcaatgaacacaaagagcatggggggcgtgtcgaagaatgtcacagggctcctctcggcct

SEQ ID NO: 413 - RNA, 72 nt, synthetic construct
  source 1..72: mol_type = other RNA
accggcccagggcaatgaacacaaagagcatggggggcgtgtcgaagaatgtcacagggctcctctccgcct

SEQ ID NO: 414 - RNA, 72 nt, synthetic construct
  source 1..72: mol_type = other RNA
accggcccagggcaatgaacacaaagagcatggggggcgtgtcgaagaatgtcacagggctcctctctgcct

SEQ ID NO: 415 - RNA, 72 nt, synthetic construct
  source 1..72: mol_type = other RNA
accggcccagggcaatgaacacaaagagcatggggggcgtgtcgaagaatgtcacagggctcctctcagcct

SEQ ID NO: 416 - RNA, 73 nt, synthetic construct
  source 1..73: mol_type = other RNA
caccggcccagggcaatgaacacaaagagcatggggggcgtgtcgaagaatgtcacagggctcctctcagcct

SEQ ID NO: 417 - RNA, 73 nt, synthetic construct
  source 1..73: mol_type = other RNA
caccggcccagggcaatgaacacaaagagcatggggggcgtgtcgaagaatgtcacagggctcctctcggcct

SEQ ID NO: 418 - RNA, 73 nt, synthetic construct
  source 1..73: mol_type = other RNA
caccggcccagggcaatgaacacaaagagcatggggggcgtgtcgaagaatgtcacagggctcctctctgcct

SEQ ID NO: 419 - RNA, 73 nt, synthetic construct
  source 1..73: mol_type = other RNA
caccggcccagggcaatgaacacaaagagcatggggggcgtgtcgaagaatgtcacagggctcctctccgcct

SEQ ID NO: 420 - RNA, 74 nt, synthetic construct
  source 1..74: mol_type = other RNA
ccaccggcccagggcaatgaacacaaagagcatggggggcgtgtcgaagaatgtcacagggctcctctcagcct

SEQ ID NO: 421 - RNA, 74 nt, synthetic construct
  source 1..74: mol_type = other RNA
ccaccggcccagggcaatgaacacaaagagcatggggggcgtgtcgaagaatgtcacagggctcctctctgcct

SEQ ID NO: 422 - RNA, 74 nt, synthetic construct
  source 1..74: mol_type = other RNA
ccaccggcccagggcaatgaacacaaagagcatggggggcgtgtcgaagaatgtcacagggctcctctcggcct

SEQ ID NO: 423 - RNA, 74 nt, synthetic construct
  source 1..74: mol_type = other RNA
ccaccggcccagggcaatgaacacaaagagcatggggggcgtgtcgaagaatgtcacagggctcctctccgcct

SEQ ID NO: 424 - RNA, 75 nt, synthetic construct
  source 1..75: mol_type = other RNA
gccaccggcccagggcaatgaacacaaagagcatggggggcgtgtcgaagaatgtcacagggctcctctctgcct

SEQ ID NO: 425 - RNA, 75 nt, synthetic construct
  source 1..75: mol_type = other RNA
gccaccggcccagggcaatgaacacaaagagcatggggggcgtgtcgaagaatgtcacagggctcctctcagcct

SEQ ID NO: 426 - RNA, 75 nt, synthetic construct
  source 1..75: mol_type = other RNA
gccaccggcccagggcaatgaacacaaagagcatggggggcgtgtcgaagaatgtcacagggctcctctcggcct

SEQ ID NO: 427 - RNA, 75 nt, synthetic construct
  source 1..75: mol_type = other RNA
gccaccggcccagggcaatgaacacaaagagcatggggggcgtgtcgaagaatgtcacagggctcctctccgcct

SEQ ID NO: 428 - RNA, 76 nt, synthetic construct
  source 1..76: mol_type = other RNA
agccaccggcccagggcaatgaacacaaagagcatggggggcgtgtcgaagaatgtcacagggctcctctcggcct

SEQ ID NO: 429 - RNA, 76 nt, synthetic construct
  source 1..76: mol_type = other RNA
agccaccggcccagggcaatgaacacaaagagcatggggggcgtgtcgaagaatgtcacagggctcctctccgcct

SEQ ID NO: 430 - RNA, 76 nt, synthetic construct
  source 1..76: mol_type = other RNA
agccaccggcccagggcaatgaacacaaagagcatggggggcgtgtcgaagaatgtcacagggctcctctcagcct

SEQ ID NO: 431 - RNA, 76 nt, synthetic construct
  source 1..76: mol_type = other RNA
agccaccggcccagggcaatgaacacaaagagcatggggggcgtgtcgaagaatgtcacagggctcctctctgcct

SEQ ID NO: 432 - RNA, 77 nt, synthetic construct
  source 1..77: mol_type = other RNA
cagccaccggcccagggcaatgaacacaaagagcatggggggcgtgtcgaagaatgtcacagggctcctctccgcct

SEQ ID NO: 433 - RNA, 77 nt, synthetic construct
  source 1..77: mol_type = other RNA
cagccaccggcccagggcaatgaacacaaagagcatggggggcgtgtcgaagaatgtcacagggctcctctctgcct

SEQ ID NO: 434 - RNA, 77 nt, synthetic construct
  source 1..77: mol_type = other RNA
cagccaccggcccagggcaatgaacacaaagagcatggggggcgtgtcgaagaatgtcacagggctcctctcagcct

SEQ ID NO: 435 - RNA, 77 nt, synthetic construct
  source 1..77: mol_type = other RNA
cagccaccggcccagggcaatgaacacaaagagcatggggggcgtgtcgaagaatgtcacagggctcctctcggcct

SEQ ID NO: 436 - RNA, 78 nt, synthetic construct
  source 1..78: mol_type = other RNA
ccagccaccggcccagggcaatgaacacaaagagcatggggggcgtgtcgaagaatgtcacagggctcctctcggcct

SEQ ID NO: 437 - RNA, 78 nt, synthetic construct
  source 1..78: mol_type = other RNA
ccagccaccggcccagggcaatgaacacaaagagcatggggggcgtgtcgaagaatgtcacagggctcctctctgcct

SEQ ID NO: 438 - RNA, 78 nt, synthetic construct
  source 1..78: mol_type = other RNA
ccagccaccggcccagggcaatgaacacaaagagcatggggggcgtgtcgaagaatgtcacagggctcctctccgcct

SEQ ID NO: 439 - RNA, 78 nt, synthetic construct
  source 1..78: mol_type = other RNA
ccagccaccggcccagggcaatgaacacaaagagcatggggggcgtgtcgaagaatgtcacagggctcctctcagcct

SEQ ID NO: 440 - RNA, 79 nt, synthetic construct
  source 1..79: mol_type = other RNA
tccagccaccggcccagggcaatgaacacaaagagcatggggggcgtgtcgaagaatgtcacagggctcctctcggcct

SEQ ID NO: 441 - RNA, 79 nt, synthetic construct
  source 1..79: mol_type = other RNA
tccagccaccggcccagggcaatgaacacaaagagcatggggggcgtgtcgaagaatgtcacagggctcctctcagcct

SEQ ID NO: 442 - RNA, 79 nt, synthetic construct
  source 1..79: mol_type = other RNA
tccagccaccggcccagggcaatgaacacaaagagcatggggggcgtgtcgaagaatgtcacagggctcctctccgcct

SEQ ID NO: 443 - RNA, 79 nt, synthetic construct
  source 1..79: mol_type = other RNA
tccagccaccggcccagggcaatgaacacaaagagcatggggggcgtgtcgaagaatgtcacagggctcctctctgcct

SEQ ID NO: 444 - RNA, 80 nt, synthetic construct
  source 1..80: mol_type = other RNA
ttccagccaccggcccagggcaatgaacacaaagagcatggggggcgtgtcgaagaatgtcacagggctcctctcagcct

SEQ ID NO: 445 - RNA, 80 nt, synthetic construct
  source 1..80: mol_type = other RNA
ttccagccaccggcccagggcaatgaacacaaagagcatggggggcgtgtcgaagaatgtcacagggctcctctcggcct

SEQ ID NO: 446 - RNA, 80 nt, synthetic construct
  source 1..80: mol_type = other RNA
ttccagccaccggcccagggcaatgaacacaaagagcatggggggcgtgtcgaagaatgtcacagggctcctctctgcct

SEQ ID NO: 447 - RNA, 80 nt, synthetic construct
  source 1..80: mol_type = other RNA
ttccagccaccggcccagggcaatgaacacaaagagcatggggggcgtgtcgaagaatgtcacagggctcctctccgcct

SEQ ID NO: 448 - RNA, 81 nt, synthetic construct
  source 1..81: mol_type = other RNA
gttccagccaccggcccagggcaatgaacacaaagagcatggggggcgtgtcgaagaatgtcacagggctcctctctgcct

SEQ ID NO: 449 - RNA, 81 nt, synthetic construct
  source 1..81: mol_type = other RNA
gttccagccaccggcccagggcaatgaacacaaagagcatggggggcgtgtcgaagaatgtcacagggctcctctcggcct

SEQ ID NO: 450 - RNA, 81 nt, synthetic construct
  source 1..81: mol_type = other RNA
gttccagccaccggcccagggcaatgaacacaaagagcatggggggcgtgtcgaagaatgtcacagggctcctctccgcct

SEQ ID NO: 451 - RNA, 81 nt, synthetic construct
  source 1..81: mol_type = other RNA
gttccagccaccggcccagggcaatgaacacaaagagcatggggggcgtgtcgaagaatgtcacagggctcctctcagcct

SEQ ID NO: 452 - RNA, 82 nt, synthetic construct
  source 1..82: mol_type = other RNA
tgttccagccaccggcccagggcaatgaacacaaagagcatggggggcgtgtcgaagaatgtcacagggctcctctccgcct

SEQ ID NO: 453 - RNA, 82 nt, synthetic construct
  source 1..82: mol_type = other RNA
tgttccagccaccggcccagggcaatgaacacaaagagcatggggggcgtgtcgaagaatgtcacagggctcctctcagcct

SEQ ID NO: 454 - RNA, 82 nt, synthetic construct
  source 1..82: mol_type = other RNA
tgttccagccaccggcccagggcaatgaacacaaagagcatggggggcgtgtcgaagaatgtcacagggctcctctctgcct

SEQ ID NO: 455 - RNA, 82 nt, synthetic construct
  source 1..82: mol_type = other RNA
tgttccagccaccggcccagggcaatgaacacaaagagcatggggggcgtgtcgaagaatgtcacagggctcctctcggcct

SEQ ID NO: 456 - RNA, 83 nt, synthetic construct
  source 1..83: mol_type = other RNA
gtgttccagccaccggcccagggcaatgaacacaaagagcatggggggcgtgtcgaagaatgtcacagggctcctctcggcct

SEQ ID NO: 457 - RNA, 83 nt, synthetic construct
  source 1..83: mol_type = other RNA
gtgttccagccaccggcccagggcaatgaacacaaagagcatggggggcgtgtcgaagaatgtcacagggctcctctccgcct

SEQ ID NO: 458 - RNA, 83 nt, synthetic construct
  source 1..83: mol_type = other RNA
gtgttccagccaccggcccagggcaatgaacacaaagagcatggggggcgtgtcgaagaatgtcacagggctcctctcagcct

SEQ ID NO: 459 - RNA, 83 nt, synthetic construct
  source 1..83: mol_type = other RNA
gtgttccagccaccggcccagggcaatgaacacaaagagcatggggggcgtgtcgaagaatgtcacagggctcctctctgcct

SEQ ID NO: 460 - RNA, 84 nt, synthetic construct
  source 1..84: mol_type = other RNA
agtgttccagccaccggcccagggcaatgaacacaaagagcatggggggcgtgtcgaagaatgtcacagggctcctctcggcct

SEQ ID NO: 461 - RNA, 84 nt, synthetic construct
  source 1..84: mol_type = other RNA
agtgttccagccaccggcccagggcaatgaacacaaagagcatggggggcgtgtcgaagaatgtcacagggctcctctctgcct

SEQ ID NO: 462 - RNA, 84 nt, synthetic construct
  source 1..84: mol_type = other RNA
agtgttccagccaccggcccagggcaatgaacacaaagagcatggggggcgtgtcgaagaatgtcacagggctcctctccgcct

SEQ ID NO: 463 - RNA, 84 nt, synthetic construct
  source 1..84: mol_type = other RNA
agtgttccagccaccggcccagggcaatgaacacaaagagcatggggggcgtgtcgaagaatgtcacagggctcctctcagcct

SEQ ID NO: 464 - RNA, 85 nt, synthetic construct
  source 1..85: mol_type = other RNA
aagtgttccagccaccggcccagggcaatgaacacaaagagcatggggggcgtgtcgaagaatgtcacagggctcctctcggcct

SEQ ID NO: 465 - RNA, 85 nt, synthetic construct
  source 1..85: mol_type = other RNA
aagtgttccagccaccggcccagggcaatgaacacaaagagcatggggggcgtgtcgaagaatgtcacagggctcctctctgcct

SEQ ID NO: 466 - RNA, 85 nt, synthetic construct
  source 1..85: mol_type = other RNA
aagtgttccagccaccggcccagggcaatgaacacaaagagcatggggggcgtgtcgaagaatgtcacagggctcctctcagcct

SEQ ID NO: 467 - RNA, 85 nt, synthetic construct
  source 1..85: mol_type = other RNA
aagtgttccagccaccggcccagggcaatgaacacaaagagcatggggggcgtgtcgaagaatgtcacagggctcctctccgcct

SEQ ID NO: 468 - RNA, 86 nt, synthetic construct
  source 1..86: mol_type = other RNA
caagtgttccagccaccggcccagggcaatgaacacaaagagcatggggggcgtgtcgaagaatgtcacagggctcctctcagcct

SEQ ID NO: 469 - RNA, 86 nt, synthetic construct
  source 1..86: mol_type = other RNA
caagtgttccagccaccggcccagggcaatgaacacaaagagcatggggggcgtgtcgaagaatgtcacagggctcctctcggcct

SEQ ID NO: 470 - RNA, 86 nt, synthetic construct
  source 1..86: mol_type = other RNA
caagtgttccagccaccggcccagggcaatgaacacaaagagcatggggggcgtgtcgaagaatgtcacagggctcctctccgcct

SEQ ID NO: 471 - RNA, 86 nt, synthetic construct
  source 1..86: mol_type = other RNA
caagtgttccagccaccggcccagggcaatgaacacaaagagcatggggggcgtgtcgaagaatgtcacagggctcctctctgcct

SEQ ID NO: 472 - RNA, 87 nt, synthetic construct
  source 1..87: mol_type = other RNA
ccaagtgttccagccaccggcccagggcaatgaacacaaagagcatggggggcgtgtcgaagaatgtcacagggctcctctcagcct

SEQ ID NO: 473 - RNA, 87 nt, synthetic construct
  source 1..87: mol_type = other RNA
ccaagtgttccagccaccggcccagggcaatgaacacaaagagcatggggggcgtgtcgaagaatgtcacagggctcctctccgcct

SEQ ID NO: 474 - RNA, 87 nt, synthetic construct
  source 1..87: mol_type = other RNA
ccaagtgttccagccaccggcccagggcaatgaacacaaagagcatggggggcgtgtcgaagaatgtcacagggctcctctctgcct

SEQ ID NO: 475 - RNA, 87 nt, synthetic construct
  source 1..87: mol_type = other RNA
ccaagtgttccagccaccggcccagggcaatgaacacaaagagcatggggggcgtgtcgaagaatgtcacagggctcctctcggcct

SEQ ID NO: 476 - RNA, 88 nt, synthetic construct
  source 1..88: mol_type = other RNA
gccaagtgttccagccaccggcccagggcaatgaacacaaagagcatggggggcgtgtcgaagaatgtcacagggctcctctccgcct

SEQ ID NO: 477 - RNA, 88 nt, synthetic construct
  source 1..88: mol_type = other RNA
gccaagtgttccagccaccggcccagggcaatgaacacaaagagcatggggggcgtgtcgaagaatgtcacagggctcctctcggcct

SEQ ID NO: 478 - RNA, 88 nt, synthetic construct
  source 1..88: mol_type = other RNA
gccaagtgttccagccaccggcccagggcaatgaacacaaagagcatggggggcgtgtcgaagaatgtcacagggctcctctctgcct

SEQ ID NO: 479 - RNA, 88 nt, synthetic construct
  source 1..88: mol_type = other RNA
gccaagtgttccagccaccggcccagggcaatgaacacaaagagcatggggggcgtgtcgaagaatgtcacagggctcctctcagcct

SEQ ID NO: 480 - RNA, 89 nt, synthetic construct
  source 1..89: mol_type = other RNA
tgccaagtgttccagccaccggcccagggcaatgaacacaaagagcatggggggcgtgtcgaagaatgtcacagggctcctctctgcct

SEQ ID NO: 481 - RNA, 89 nt, synthetic construct
  source 1..89: mol_type = other RNA
tgccaagtgttccagccaccggcccagggcaatgaacacaaagagcatggggggcgtgtcgaagaatgtcacagggctcctctcagcct

SEQ ID NO: 482 - RNA, 89 nt, synthetic construct
  source 1..89: mol_type = other RNA
tgccaagtgttccagccaccggcccagggcaatgaacacaaagagcatggggggcgtgtcgaagaatgtcacagggctcctctccgcct

SEQ ID NO: 483 - RNA, 89 nt, synthetic construct
  source 1..89: mol_type = other RNA
tgccaagtgttccagccaccggcccagggcaatgaacacaaagagcatggggggcgtgtcgaagaatgtcacagggctcctctcggcct

SEQ ID NO: 484 - RNA, 90 nt, synthetic construct
  source 1..90: mol_type = other RNA
ttgccaagtgttccagccaccggcccagggcaatgaacacaaagagcatggggggcgtgtcgaagaatgtcacagggctcctctcagcct

SEQ ID NO: 485 - RNA, 90 nt, synthetic construct
  source 1..90: mol_type = other RNA
ttgccaagtgttccagccaccggcccagggcaatgaacacaaagagcatggggggcgtgtcgaagaatgtcacagggctcctctcggcct

SEQ ID NO: 486 - RNA, 90 nt, synthetic construct
  source 1..90: mol_type = other RNA
ttgccaagtgttccagccaccggcccagggcaatgaacacaaagagcatggggggcgtgtcgaagaatgtcacagggctcctctccgcct

SEQ ID NO: 487 - RNA, 90 nt, synthetic construct
  source 1..90: mol_type = other RNA
ttgccaagtgttccagccaccggcccagggcaatgaacacaaagagcatggggggcgtgtcgaagaatgtcacagggctcctctctgcct

SEQ ID NO: 488 - RNA, 91 nt, synthetic construct
  source 1..91: mol_type = other RNA
tttgccaagtgttccagccaccggcccagggcaatgaacacaaagagcatggggggcgtgtcgaagaatgtcacagggctcctctctgcct

SEQ ID NO: 489 - RNA, 91 nt, synthetic construct
  source 1..91: mol_type = other RNA
tttgccaagtgttccagccaccggcccagggcaatgaacacaaagagcatggggggcgtgtcgaagaatgtcacagggctcctctcggcct

SEQ ID NO: 490 - RNA, 91 nt, synthetic construct
  source 1..91: mol_type = other RNA
tttgccaagtgttccagccaccggcccagggcaatgaacacaaagagcatggggggcgtgtcgaagaatgtcacagggctcctctcagcct

SEQ ID NO: 491 - RNA, 91 nt, synthetic construct
  source 1..91: mol_type = other RNA
tttgccaagtgttccagccaccggcccagggcaatgaacacaaagagcatggggggcgtgtcgaagaatgtcacagggctcctctccgcct

SEQ ID NO: 492 - RNA, 92 nt, synthetic construct
  source 1..92: mol_type = other RNA
ctttgccaagtgttccagccaccggcccagggcaatgaacacaaagagcatggggggcgtgtcgaagaatgtcacagggctcctctccgcct

SEQ ID NO: 493 - RNA, 92 nt, synthetic construct
  source 1..92: mol_type = other RNA
ctttgccaagtgttccagccaccggcccagggcaatgaacacaaagagcatggggggcgtgtcgaagaatgtcacagggctcctctcggcct

SEQ ID NO: 494 - RNA, 92 nt, synthetic construct
  source 1..92: mol_type = other RNA
ctttgccaagtgttccagccaccggcccagggcaatgaacacaaagagcatggggggcgtgtcgaagaatgtcacagggctcctctcagcct

SEQ ID NO: 495 - RNA, 92 nt, synthetic construct
  source 1..92: mol_type = other RNA
ctttgccaagtgttccagccaccggcccagggcaatgaacacaaagagcatggggggcgtgtcgaagaatgtcacagggctcctctctgcct

SEQ ID NO: 496 - RNA, 93 nt, synthetic construct
  source 1..93: mol_type = other RNA
cctttgccaagtgttccagccaccggcccagggcaatgaacacaaagagcatggggggcgtgtcgaagaatgtcacagggctcctctctgcct

SEQ ID NO: 497 - RNA, 93 nt, synthetic construct
  source 1..93: mol_type = other RNA
cctttgccaagtgttccagccaccggcccagggcaatgaacacaaagagcatggggggcgtgtcgaagaatgtcacagggctcctctccgcct

SEQ ID NO: 498 - RNA, 93 nt, synthetic construct
  source 1..93: mol_type = other RNA
cctttgccaagtgttccagccaccggcccagggcaatgaacacaaagagcatggggggcgtgtcgaagaatgtcacagggctcctctcggcct

SEQ ID NO: 499 - RNA, 93 nt, synthetic construct
  source 1..93: mol_type = other RNA
cctttgccaagtgttccagccaccggcccagggcaatgaacacaaagagcatggggggcgtgtcgaagaatgtcacagggctcctctcagcct

SEQ ID NO: 500 - RNA, 94 nt, synthetic construct
  source 1..94: mol_type = other RNA
acctttgccaagtgttccagccaccggcccagggcaatgaacacaaagagcatggggggcgtgtcgaagaatgtcacagggctcctctctgcct

SEQ ID NO: 501 - RNA, 94 nt, synthetic construct
  source 1..94: mol_type = other RNA
acctttgccaagtgttccagccaccggcccagggcaatgaacacaaagagcatggggggcgtgtcgaagaatgtcacagggctcctctccgcct

SEQ ID NO: 502 - RNA, 94 nt, synthetic construct
  source 1..94: mol_type = other RNA
acctttgccaagtgttccagccaccggcccagggcaatgaacacaaagagcatggggggcgtgtcgaagaatgtcacagggctcctctcagcct

SEQ ID NO: 503 - RNA, 94 nt, synthetic construct
  source 1..94: mol_type = other RNA
acctttgccaagtgttccagccaccggcccagggcaatgaacacaaagagcatggggggcgtgtcgaagaatgtcacagggctcctctcggcct

SEQ ID NO: 504 - RNA, 95 nt, synthetic construct
  source 1..95: mol_type = other RNA
tacctttgccaagtgttccagccaccggcccagggcaatgaacacaaagagcatggggggcgtgtcgaagaatgtcacagggctcctctctgcct

SEQ ID NO: 505 - RNA, 95 nt, synthetic construct
  source 1..95: mol_type = other RNA
tacctttgccaagtgttccagccaccggcccagggcaatgaacacaaagagcatggggggcgtgtcgaagaatgtcacagggctcctctcagcct

SEQ ID NO: 506 - RNA, 95 nt, synthetic construct
  source 1..95: mol_type = other RNA
tacctttgccaagtgttccagccaccggcccagggcaatgaacacaaagagcatggggggcgtgtcgaagaatgtcacagggctcctctccgcct

SEQ ID NO: 507 - RNA, 95 nt, synthetic construct
  source 1..95: mol_type = other RNA
tacctttgccaagtgttccagccaccggcccagggcaatgaacacaaagagcatggggggcgtgtcgaagaatgtcacagggctcctctcggcct

SEQ ID NO: 508 - RNA, 96 nt, synthetic construct
  source 1..96: mol_type = other RNA
ttacctttgccaagtgttccagccaccggcccagggcaatgaacacaaagagcatggggggcgtgtcgaagaatgtcacagggctcctctccgcct

SEQ ID NO: 509 - RNA, 96 nt, synthetic construct
  source 1..96: mol_type = other RNA
ttacctttgccaagtgttccagccaccggcccagggcaatgaacacaaagagcatggggggcgtgtcgaagaatgtcacagggctcctctcagcct

SEQ ID NO: 510 - RNA, 96 nt, synthetic construct
  source 1..96: mol_type = other RNA
ttacctttgccaagtgttccagccaccggcccagggcaatgaacacaaagagcatggggggcgtgtcgaagaatgtcacagggctcctctctgcct

SEQ ID NO: 511 - RNA, 96 nt, synthetic construct
  source 1..96: mol_type = other RNA
ttacctttgccaagtgttccagccaccggcccagggcaatgaacacaaagagcatggggggcgtgtcgaagaatgtcacagggctcctctcggcct

SEQ ID NO: 512 - RNA, 97 nt, synthetic construct
  source 1..97: mol_type = other RNA
gttacctttgccaagtgttccagccaccggcccagggcaatgaacacaaagagcatggggggcgtgtcgaagaatgtcacagggctcctctcggcct

SEQ ID NO: 513 - RNA, 97 nt, synthetic construct
  source 1..97: mol_type = other RNA
gttacctttgccaagtgttccagccaccggcccagggcaatgaacacaaagagcatggggggcgtgtcgaagaatgtcacagggctcctctcagcct

SEQ ID NO: 514 - RNA, 97 nt, synthetic construct
  source 1..97: mol_type = other RNA
gttacctttgccaagtgttccagccaccggcccagggcaatgaacacaaagagcatggggggcgtgtcgaagaatgtcacagggctcctctccgcct

SEQ ID NO: 515 - RNA, 97 nt, synthetic construct
  source 1..97: mol_type = other RNA
gttacctttgccaagtgttccagccaccggcccagggcaatgaacacaaagagcatggggggcgtgtcgaagaatgtcacagggctcctctctgcct

SEQ ID NO: 516 - RNA, 98 nt, synthetic construct
  source 1..98: mol_type = other RNA
tgttacctttgccaagtgttccagccaccggcccagggcaatgaacacaaagagcatggggggcgtgtcgaagaatgtcacagggctcctctcggcct

SEQ ID NO: 517 - RNA, 98 nt, synthetic construct
  source 1..98: mol_type = other RNA
tgttacctttgccaagtgttccagccaccggcccagggcaatgaacacaaagagcatggggggcgtgtcgaagaatgtcacagggctcctctctgcct

SEQ ID NO: 518 - RNA, 98 nt, synthetic construct
  source 1..98: mol_type = other RNA
tgttacctttgccaagtgttccagccaccggcccagggcaatgaacacaaagagcatggggggcgtgtcgaagaatgtcacagggctcctctcagcct

SEQ ID NO: 519 - RNA, 98 nt, synthetic construct
  source 1..98: mol_type = other RNA
tgttacctttgccaagtgttccagccaccggcccagggcaatgaacacaaagagcatggggggcgtgtcgaagaatgtcacagggctcctctccgcct

SEQ ID NO: 520 - RNA, 99 nt, synthetic construct
  source 1..99: mol_type = other RNA
ctgttacctttgccaagtgttccagccaccggcccagggcaatgaacacaaagagcatggggggcgtgtcgaagaatgtcacagggctcctctcggcct

SEQ ID NO: 521 - RNA, 99 nt, synthetic construct
  source 1..99: mol_type = other RNA
ctgttacctttgccaagtgttccagccaccggcccagggcaatgaacacaaagagcatggggggcgtgtcgaagaatgtcacagggctcctctccgcct

SEQ ID NO: 522 - RNA, 99 nt, synthetic construct
  source 1..99: mol_type = other RNA
ctgttacctttgccaagtgttccagccaccggcccagggcaatgaacacaaagagcatggggggcgtgtcgaagaatgtcacagggctcctctctgcct

SEQ ID NO: 523 - RNA, 99 nt, synthetic construct
  source 1..99: mol_type = other RNA
ctgttacctttgccaagtgttccagccaccggcccagggcaatgaacacaaagagcatggggggcgtgtcgaagaatgtcacagggctcctctcagcct

SEQ ID NO: 524 - RNA, 100 nt, synthetic construct
  source 1..100: mol_type = other RNA
gctgttacctttgccaagtgttccagccaccggcccagggcaatgaacacaaagagcatggggggcgtgtcgaagaatgtcacagggctcctctccgcct

SEQ ID NO: 525 - RNA, 100 nt, synthetic construct
  source 1..100: mol_type = other RNA
gctgttacctttgccaagtgttccagccaccggcccagggcaatgaacacaaagagcatggggggcgtgtcgaagaatgtcacagggctcctctcggcct

SEQ ID NO: 526 - RNA, 100 nt, synthetic construct
  source 1..100: mol_type = other RNA
gctgttacctttgccaagtgttccagccaccggcccagggcaatgaacacaaagagcatggggggcgtgtcgaagaatgtcacagggctcctctctgcct

SEQ ID NO: 527 - RNA, 100 nt, synthetic construct
  source 1..100: mol_type = other RNA
gctgttacctttgccaagtgttccagccaccggcccagggcaatgaacacaaagagcatggggggcgtgtcgaagaatgtcacagggctcctctcagcct

SEQ ID NO: 528 - RNA, 16 nt, synthetic construct
  source 1..16: mol_type = other RNA
ggctgagaaggcggag

SEQ ID NO: 529 - RNA, 17 nt, synthetic construct
  source 1..17: mol_type = other RNA
tggctgagaaggcggag

SEQ ID NO: 530 - RNA, 18 nt, synthetic construct
  source 1..18: mol_type = other RNA
gtggctgagaaggcggag

SEQ ID NO: 531 - RNA, 19 nt, synthetic construct
  source 1..19: mol_type = other RNA
tgtggctgagaaggcggag

SEQ ID NO: 532 - RNA, 20 nt, synthetic construct
  source 1..20: mol_type = other RNA
ctgtggctgagaaggcggag

SEQ ID NO: 533 - RNA, 21 nt, synthetic construct
  source 1..21: mol_type = other RNA
gctgtggctgagaaggcggag

SEQ ID NO: 534 - RNA, 22 nt, synthetic construct
  source 1..22: mol_type = other RNA
tgctgtggctgagaaggcggag

SEQ ID NO: 535-541 - skipped (7 entries)

SEQ ID NO: 542 - RNA, 10 nt, synthetic construct
  source 1..10: mol_type = other RNA
cgccttctca

SEQ ID NO: 543 - RNA, 11 nt, synthetic construct
  source 1..11: mol_type = other RNA
cgccttctcag

SEQ ID NO: 544 - RNA, 12 nt, synthetic construct
  source 1..12: mol_type = other RNA
cgccttctcagc

SEQ ID NO: 545 - RNA, 13 nt, synthetic construct
  source 1..13: mol_type = other RNA
cgccttctcagcc

SEQ ID NO: 546 - RNA, 14 nt, synthetic construct
  source 1..14: mol_type = other RNA
cgccttctcagcca

SEQ ID NO: 547 - RNA, 15 nt, synthetic construct
  source 1..15: mol_type = other RNA
cgccttctcagccac

SEQ ID NO: 548 - RNA, 16 nt, synthetic construct
  source 1..16: mol_type = other RNA
cgccttctcagccaca

SEQ ID NO: 549 - RNA, 17 nt, synthetic construct
  source 1..17: mol_type = other RNA
cgccttctcagccacag

SEQ ID NO: 550 - RNA, 18 nt, synthetic construct
  source 1..18: mol_type = other RNA
cgccttctcagccacagc

SEQ ID NO: 551 - RNA, 19 nt, synthetic construct
  source 1..19: mol_type = other RNA
cgccttctcagccacagca

SEQ ID NO: 552 - RNA, 65 nt, synthetic construct
  source 1..65: mol_type = other RNA
cggcccagggcaatgaacacaaagagcatggggggcgtgtcgaagaatgtcacagggcttctctc

SEQ ID NO: 553 - RNA, 65 nt, synthetic construct
  source 1..65: mol_type = other RNA
cggcccagggcaatgaacacaaagagcatggggggcgtgtcgaagaatgtcacagggcttcgctc

SEQ ID NO: 554 - RNA, 65 nt, synthetic construct
  source 1..65: mol_type = other RNA
cggcccagggcaatgaacacaaagagcatggggggcgtgtcgaagaatgtcacagggctacgctc

SEQ ID NO: 555 - RNA, 65 nt, synthetic construct
  source 1..65: mol_type = other RNA
cggcccagggcaatgaacacaaagagcatggggggcgtgtcgaagaatgtcacagggctgcgctc

SEQ ID NO: 556 - RNA, 65 nt, synthetic construct
  source 1..65: mol_type = other RNA
cggcccagggcaatgaacacaaagagcatggggggcgtgtcgaagaatgtcacagggctcctctc

SEQ ID NO: 557 - RNA, 66 nt, synthetic construct
  source 1..66: mol_type = other RNA
ccggcccagggcaatgaacacaaagagcatggggggcgtgtcgaagaatgtcacagggcttcgctc

SEQ ID NO: 558 - RNA, 66 nt, synthetic construct
  source 1..66: mol_type = other RNA
ccggcccagggcaatgaacacaaagagcatggggggcgtgtcgaagaatgtcacagggctcctctc

SEQ ID NO: 559 - RNA, 66 nt, synthetic construct
  source 1..66: mol_type = other RNA
ccggcccagggcaatgaacacaaagagcatggggggcgtgtcgaagaatgtcacagggctacgctc

SEQ ID NO: 560 - RNA, 66 nt, synthetic construct
  source 1..66: mol_type = other RNA
ccggcccagggcaatgaacacaaagagcatggggggcgtgtcgaagaatgtcacagggctgcgctc

SEQ ID NO: 561 - RNA, 66 nt, synthetic construct
  source 1..66: mol_type = other RNA
ccggcccagggcaatgaacacaaagagcatggggggcgtgtcgaagaatgtcacagggcttctctc

SEQ ID NO: 562 - RNA, 67 nt, synthetic construct
  source 1..67: mol_type = other RNA
accggcccagggcaatgaacacaaagagcatggggggcgtgtcgaagaatgtcacagggctgcgctc

SEQ ID NO: 563 - RNA, 67 nt, synthetic construct
  source 1..67: mol_type = other RNA
accggcccagggcaatgaacacaaagagcatggggggcgtgtcgaagaatgtcacagggctacgctc

SEQ ID NO: 564 - RNA, 67 nt, synthetic construct
  source 1..67: mol_type = other RNA
accggcccagggcaatgaacacaaagagcatggggggcgtgtcgaagaatgtcacagggcttctctc

SEQ ID NO: 565 - RNA, 67 nt, synthetic construct
  source 1..67: mol_type = other RNA
accggcccagggcaatgaacacaaagagcatggggggcgtgtcgaagaatgtcacagggctcctctc

SEQ ID NO: 566 - RNA, 67 nt, synthetic construct
  source 1..67: mol_type = other RNA
accggcccagggcaatgaacacaaagagcatggggggcgtgtcgaagaatgtcacagggcttcgctc

SEQ ID NO: 567 - RNA, 68 nt, synthetic construct
  source 1..68: mol_type = other RNA
caccggcccagggcaatgaacacaaagagcatggggggcgtgtcgaagaatgtcacagggcttcgctc

SEQ ID NO: 568 - RNA, 68 nt, synthetic construct
  source 1..68: mol_type = other RNA
caccggcccagggcaatgaacacaaagagcatggggggcgtgtcgaagaatgtcacagggctacgctc

SEQ ID NO: 569 - RNA, 68 nt, synthetic construct
  source 1..68: mol_type = other RNA
caccggcccagggcaatgaacacaaagagcatggggggcgtgtcgaagaatgtcacagggctcctctc

SEQ ID NO: 570 - RNA, 68 nt, synthetic construct
  source 1..68: mol_type = other RNA
caccggcccagggcaatgaacacaaagagcatggggggcgtgtcgaagaatgtcacagggctgcgctc

SEQ ID NO: 571 - RNA, 68 nt, synthetic construct
  source 1..68: mol_type = other RNA
caccggcccagggcaatgaacacaaagagcatggggggcgtgtcgaagaatgtcacagggcttctctc

SEQ ID NO: 572 - RNA, 69 nt, synthetic construct
  source 1..69: mol_type = other RNA
ccaccggcccagggcaatgaacacaaagagcatggggggcgtgtcgaagaatgtcacagggcttctctc

SEQ ID NO: 573 - RNA, 69 nt, synthetic construct
  source 1..69: mol_type = other RNA
ccaccggcccagggcaatgaacacaaagagcatggggggcgtgtcgaagaatgtcacagggcttcgctc

SEQ ID NO: 574 - RNA, 69 nt, synthetic construct
  source 1..69: mol_type = other RNA
ccaccggcccagggcaatgaacacaaagagcatggggggcgtgtcgaagaatgtcacagggctacgctc

SEQ ID NO: 575 - RNA, 69 nt, synthetic construct
  source 1..69: mol_type = other RNA
ccaccggcccagggcaatgaacacaaagagcatggggggcgtgtcgaagaatgtcacagggctgcgctc

SEQ ID NO: 576 - RNA, 69 nt, synthetic construct
  source 1..69: mol_type = other RNA
ccaccggcccagggcaatgaacacaaagagcatggggggcgtgtcgaagaatgtcacagggctcctctc

SEQ ID NO: 577 - RNA, 70 nt, synthetic construct
  source 1..70: mol_type = other RNA
gccaccggcccagggcaatgaacacaaagagcatggggggcgtgtcgaagaatgtcacagggcttcgctc

SEQ ID NO: 578 - RNA, 70 nt, synthetic construct
  source 1..70: mol_type = other RNA
gccaccggcccagggcaatgaacacaaagagcatggggggcgtgtcgaagaatgtcacagggctacgctc

SEQ ID NO: 579 - RNA, 70 nt, synthetic construct
  source 1..70: mol_type = other RNA
gccaccggcccagggcaatgaacacaaagagcatggggggcgtgtcgaagaatgtcacagggctcctctc

SEQ ID NO: 580 - RNA, 70 nt, synthetic construct
  source 1..70: mol_type = other RNA
gccaccggcccagggcaatgaacacaaagagcatggggggcgtgtcgaagaatgtcacagggctgcgctc

SEQ ID NO: 581 - RNA, 70 nt, synthetic construct
  source 1..70: mol_type = other RNA
gccaccggcccagggcaatgaacacaaagagcatggggggcgtgtcgaagaatgtcacagggcttctctc

SEQ ID NO: 582 - RNA, 71 nt, synthetic construct
  source 1..71: mol_type = other RNA
agccaccggcccagggcaatgaacacaaagagcatggggggcgtgtcgaagaatgtcacagggctgcgctc

SEQ ID NO: 583 - RNA, 71 nt, synthetic construct
  source 1..71: mol_type = other RNA
agccaccggcccagggcaatgaacacaaagagcatggggggcgtgtcgaagaatgtcacagggctcctctc

SEQ ID NO: 584 - RNA, 71 nt, synthetic construct
  source 1..71: mol_type = other RNA
agccaccggcccagggcaatgaacacaaagagcatggggggcgtgtcgaagaatgtcacagggcttcgctc

SEQ ID NO: 585 - RNA, 71 nt, synthetic construct
  source 1..71: mol_type = other RNA
agccaccggcccagggcaatgaacacaaagagcatggggggcgtgtcgaagaatgtcacagggcttctctc

SEQ ID NO: 586 - RNA, 71 nt, synthetic construct
  source 1..71: mol_type = other RNA
agccaccggcccagggcaatgaacacaaagagcatggggggcgtgtcgaagaatgtcacagggctacgctc

SEQ ID NO: 587 - RNA, 72 nt, synthetic construct
  source 1..72: mol_type = other RNA
cagccaccggcccagggcaatgaacacaaagagcatggggggcgtgtcgaagaatgtcacagggctgcgctc

SEQ ID NO: 588 - RNA, 72 nt, synthetic construct
  source 1..72: mol_type = other RNA
cagccaccggcccagggcaatgaacacaaagagcatggggggcgtgtcgaagaatgtcacagggcttcgctc

SEQ ID NO: 589 - RNA, 72 nt, synthetic construct
  source 1..72: mol_type = other RNA
cagccaccggcccagggcaatgaacacaaagagcatggggggcgtgtcgaagaatgtcacagggcttctctc

SEQ ID NO: 590 - RNA, 72 nt, synthetic construct
  source 1..72: mol_type = other RNA
cagccaccggcccagggcaatgaacacaaagagcatggggggcgtgtcgaagaatgtcacagggctcctctc

SEQ ID NO: 591 - RNA, 72 nt, synthetic construct
  source 1..72: mol_type = other RNA
cagccaccggcccagggcaatgaacacaaagagcatggggggcgtgtcgaagaatgtcacagggctacgctc

SEQ ID NO: 592 - RNA, 73 nt, synthetic construct
  source 1..73: mol_type = other RNA
ccagccaccggcccagggcaatgaacacaaagagcatggggggcgtgtcgaagaatgtcacagggcttcgctc

SEQ ID NO: 593 - RNA, 73 nt, synthetic construct
  source 1..73: mol_type = other RNA
ccagccaccggcccagggcaatgaacacaaagagcatggggggcgtgtcgaagaatgtcacagggctacgctc

SEQ ID NO: 594 - RNA, 73 nt, synthetic construct
  source 1..73: mol_type = other RNA
ccagccaccggcccagggcaatgaacacaaagagcatggggggcgtgtcgaagaatgtcacagggctcctctc

SEQ ID NO: 595 - RNA, 73 nt, synthetic construct
  source 1..73: mol_type = other RNA
ccagccaccggcccagggcaatgaacacaaagagcatggggggcgtgtcgaagaatgtcacagggcttctctc

SEQ ID NO: 596 - RNA, 73 nt, synthetic construct
  source 1..73: mol_type = other RNA
ccagccaccggcccagggcaatgaacacaaagagcatggggggcgtgtcgaagaatgtcacagggctgcgctc

SEQ ID NO: 597 - RNA, 74 nt, synthetic construct
  source 1..74: mol_type = other RNA
tccagccaccggcccagggcaatgaacacaaagagcatggggggcgtgtcgaagaatgtcacagggctcctctc

SEQ ID NO: 598 - RNA, 74 nt, synthetic construct
  source 1..74: mol_type = other RNA
tccagccaccggcccagggcaatgaacacaaagagcatggggggcgtgtcgaagaatgtcacagggctgcgctc

SEQ ID NO: 599 - RNA, 74 nt, synthetic construct
  source 1..74: mol_type = other RNA
tccagccaccggcccagggcaatgaacacaaagagcatggggggcgtgtcgaagaatgtcacagggcttcgctc

SEQ ID NO: 600 - RNA, 74 nt, synthetic construct
  source 1..74: mol_type = other RNA
tccagccaccggcccagggcaatgaacacaaagagcatggggggcgtgtcgaagaatgtcacagggctacgctc

SEQ ID NO: 601 - RNA, 74 nt, synthetic construct
  source 1..74: mol_type = other RNA
tccagccaccggcccagggcaatgaacacaaagagcatggggggcgtgtcgaagaatgtcacagggcttctctc

SEQ ID NO: 602 - RNA, 75 nt, synthetic construct
  source 1..75: mol_type = other RNA
ttccagccaccggcccagggcaatgaacacaaagagcatggggggcgtgtcgaagaatgtcacagggctacgctc

SEQ ID NO: 603 - RNA, 75 nt, synthetic construct
  source 1..75: mol_type = other RNA
ttccagccaccggcccagggcaatgaacacaaagagcatggggggcgtgtcgaagaatgtcacagggctcctctc

SEQ ID NO: 604 - RNA, 75 nt, synthetic construct
  source 1..75: mol_type = other RNA
ttccagccaccggcccagggcaatgaacacaaagagcatggggggcgtgtcgaagaatgtcacagggcttcgctc

SEQ ID NO: 605 - RNA, 75 nt, synthetic construct
  source 1..75: mol_type = other RNA
ttccagccaccggcccagggcaatgaacacaaagagcatggggggcgtgtcgaagaatgtcacagggctgcgctc

SEQ ID NO: 606 - RNA, 75 nt, synthetic construct
  source 1..75: mol_type = other RNA
ttccagccaccggcccagggcaatgaacacaaagagcatggggggcgtgtcgaagaatgtcacagggcttctctc

SEQ ID NO: 607 - RNA, 76 nt, synthetic construct
  source 1..76: mol_type = other RNA
gttccagccaccggcccagggcaatgaacacaaagagcatggggggcgtgtcgaagaatgtcacagggcttctctc

SEQ ID NO: 608 - RNA, 76 nt, synthetic construct
  source 1..76: mol_type = other RNA
gttccagccaccggcccagggcaatgaacacaaagagcatggggggcgtgtcgaagaatgtcacagggctcctctc

SEQ ID NO: 609 - RNA, 76 nt, synthetic construct
  source 1..76: mol_type = other RNA
gttccagccaccggcccagggcaatgaacacaaagagcatggggggcgtgtcgaagaatgtcacagggctacgctc

SEQ ID NO: 610 - RNA, 76 nt, synthetic construct
  source 1..76: mol_type = other RNA
gttccagccaccggcccagggcaatgaacacaaagagcatggggggcgtgtcgaagaatgtcacagggcttcgctc

SEQ ID NO: 611 - RNA, 76 nt, synthetic construct
  source 1..76: mol_type = other RNA
gttccagccaccggcccagggcaatgaacacaaagagcatggggggcgtgtcgaagaatgtcacagggctgcgctc

SEQ ID NO: 612 - RNA, 77 nt, synthetic construct
  source 1..77: mol_type = other RNA
tgttccagccaccggcccagggcaatgaacacaaagagcatggggggcgtgtcgaagaatgtcacagggctgcgctc

SEQ ID NO: 613 - RNA, 77 nt, synthetic construct
  source 1..77: mol_type = other RNA
tgttccagccaccggcccagggcaatgaacacaaagagcatggggggcgtgtcgaagaatgtcacagggctacgctc

SEQ ID NO: 614 - RNA, 77 nt, synthetic construct
  source 1..77: mol_type = other RNA
tgttccagccaccggcccagggcaatgaacacaaagagcatggggggcgtgtcgaagaatgtcacagggctcctctc

SEQ ID NO: 615 - RNA, 77 nt, synthetic construct
  source 1..77: mol_type = other RNA
tgttccagccaccggcccagggcaatgaacacaaagagcatggggggcgtgtcgaagaatgtcacagggcttctctc

SEQ ID NO: 616 - RNA, 77 nt, synthetic construct
  source 1..77: mol_type = other RNA
tgttccagccaccggcccagggcaatgaacacaaagagcatggggggcgtgtcgaagaatgtcacagggcttcgctc

SEQ ID NO: 617 - RNA, 78 nt, synthetic construct
  source 1..78: mol_type = other RNA
gtgttccagccaccggcccagggcaatgaacacaaagagcatggggggcgtgtcgaagaatgtcacagggcttcgctc

SEQ ID NO: 618 - RNA, 78 nt, synthetic construct
  source 1..78: mol_type = other RNA
gtgttccagccaccggcccagggcaatgaacacaaagagcatggggggcgtgtcgaagaatgtcacagggctgcgctc

SEQ ID NO: 619 - RNA, 78 nt, synthetic construct
  source 1..78: mol_type = other RNA
gtgttccagccaccggcccagggcaatgaacacaaagagcatggggggcgtgtcgaagaatgtcacagggctcctctc

SEQ ID NO: 620 - RNA, 78 nt, synthetic construct
  source 1..78: mol_type = other RNA
gtgttccagccaccggcccagggcaatgaacacaaagagcatggggggcgtgtcgaagaatgtcacagggcttctctc

SEQ ID NO: 621 - RNA, 78 nt, synthetic construct
  source 1..78: mol_type = other RNA
gtgttccagccaccggcccagggcaatgaacacaaagagcatggggggcgtgtcgaagaatgtcacagggctacgctc

SEQ ID NO: 622 - RNA, 79 nt, synthetic construct
  source 1..79: mol_type = other RNA
agtgttccagccaccggcccagggcaatgaacacaaagagcatggggggcgtgtcgaagaatgtcacagggctcctctc

SEQ ID NO: 623 - RNA, 79 nt, synthetic construct
  source 1..79: mol_type = other RNA
agtgttccagccaccggcccagggcaatgaacacaaagagcatggggggcgtgtcgaagaatgtcacagggcttcgctc

SEQ ID NO: 624 - RNA, 79 nt, synthetic construct
  source 1..79: mol_type = other RNA
agtgttccagccaccggcccagggcaatgaacacaaagagcatggggggcgtgtcgaagaatgtcacagggcttctctc

SEQ ID NO: 625 - RNA, 79 nt, synthetic construct
  source 1..79: mol_type = other RNA
agtgttccagccaccggcccagggcaatgaacacaaagagcatggggggcgtgtcgaagaatgtcacagggctacgctc

SEQ ID NO: 626 - RNA, 79 nt, synthetic construct
  source 1..79: mol_type = other RNA
agtgttccagccaccggcccagggcaatgaacacaaagagcatggggggcgtgtcgaagaatgtcacagggctgcgctc

SEQ ID NO: 627 - RNA, 80 nt, synthetic construct
  source 1..80: mol_type = other RNA
aagtgttccagccaccggcccagggcaatgaacacaaagagcatggggggcgtgtcgaagaatgtcacagggctgcgctc

SEQ ID NO: 628 - RNA, 80 nt, synthetic construct
  source 1..80: mol_type = other RNA
aagtgttccagccaccggcccagggcaatgaacacaaagagcatggggggcgtgtcgaagaatgtcacagggctcctctc

SEQ ID NO: 629 - RNA, 80 nt, synthetic construct
  source 1..80: mol_type = other RNA
aagtgttccagccaccggcccagggcaatgaacacaaagagcatggggggcgtgtcgaagaatgtcacagggcttcgctc

SEQ ID NO: 630 - RNA, 80 nt, synthetic construct
  source 1..80: mol_type = other RNA
aagtgttccagccaccggcccagggcaatgaacacaaagagcatggggggcgtgtcgaagaatgtcacagggcttctctc

SEQ ID NO: 631 - RNA, 80 nt, synthetic construct
  source 1..80: mol_type = other RNA
aagtgttccagccaccggcccagggcaatgaacacaaagagcatggggggcgtgtcgaagaatgtcacagggctacgctc

SEQ ID NO: 632 - RNA, 81 nt, synthetic construct
  source 1..81: mol_type = other RNA
caagtgttccagccaccggcccagggcaatgaacacaaagagcatggggggcgtgtcgaagaatgtcacagggctacgctc

SEQ ID NO: 633 - RNA, 81 nt, synthetic construct
  source 1..81: mol_type = other RNA
caagtgttccagccaccggcccagggcaatgaacacaaagagcatggggggcgtgtcgaagaatgtcacagggctcctctc

SEQ ID NO: 634 - RNA, 81 nt, synthetic construct
  source 1..81: mol_type = other RNA
caagtgttccagccaccggcccagggcaatgaacacaaagagcatggggggcgtgtcgaagaatgtcacagggcttcgctc

SEQ ID NO: 635 - RNA, 81 nt, synthetic construct
  source 1..81: mol_type = other RNA
caagtgttccagccaccggcccagggcaatgaacacaaagagcatggggggcgtgtcgaagaatgtcacagggctgcgctc

SEQ ID NO: 636 - RNA, 81 nt, synthetic construct
  source 1..81: mol_type = other RNA
caagtgttccagccaccggcccagggcaatgaacacaaagagcatggggggcgtgtcgaagaatgtcacagggcttctctc

SEQ ID NO: 637 - RNA, 82 nt, synthetic construct
  source 1..82: mol_type = other RNA
ccaagtgttccagccaccggcccagggcaatgaacacaaagagcatggggggcgtgtcgaagaatgtcacagggctacgctc

SEQ ID NO: 638 - RNA, 82 nt, synthetic construct
  source 1..82: mol_type = other RNA
ccaagtgttccagccaccggcccagggcaatgaacacaaagagcatggggggcgtgtcgaagaatgtcacagggcttctctc

SEQ ID NO: 639 - RNA, 82 nt, synthetic construct
  source 1..82: mol_type = other RNA
ccaagtgttccagccaccggcccagggcaatgaacacaaagagcatggggggcgtgtcgaagaatgtcacagggctgcgctc

SEQ ID NO: 640 - RNA, 82 nt, synthetic construct
  source 1..82: mol_type = other RNA
ccaagtgttccagccaccggcccagggcaatgaacacaaagagcatggggggcgtgtcgaagaatgtcacagggctcctctc

SEQ ID NO: 641 - RNA, 82 nt, synthetic construct
  source 1..82: mol_type = other RNA
ccaagtgttccagccaccggcccagggcaatgaacacaaagagcatggggggcgtgtcgaagaatgtcacagggcttcgctc

SEQ ID NO: 642 - RNA, 83 nt, synthetic construct
  source 1..83: mol_type = other RNA
gccaagtgttccagccaccggcccagggcaatgaacacaaagagcatggggggcgtgtcgaagaatgtcacagggctacgctc

SEQ ID NO: 643 - RNA, 83 nt, synthetic construct
  source 1..83: mol_type = other RNA
gccaagtgttccagccaccggcccagggcaatgaacacaaagagcatggggggcgtgtcgaagaatgtcacagggctcctctc

SEQ ID NO: 644 - RNA, 83 nt, synthetic construct
  source 1..83: mol_type = other RNA
gccaagtgttccagccaccggcccagggcaatgaacacaaagagcatggggggcgtgtcgaagaatgtcacagggcttcgctc

SEQ ID NO: 645 - RNA, 83 nt, synthetic construct
  source 1..83: mol_type = other RNA
gccaagtgttccagccaccggcccagggcaatgaacacaaagagcatggggggcgtgtcgaagaatgtcacagggcttctctc

SEQ ID NO: 646 - RNA, 83 nt, synthetic construct
  source 1..83: mol_type = other RNA
gccaagtgttccagccaccggcccagggcaatgaacacaaagagcatggggggcgtgtcgaagaatgtcacagggctgcgctc

SEQ ID NO: 647 - RNA, 84 nt, synthetic construct
  source 1..84: mol_type = other RNA
tgccaagtgttccagccaccggcccagggcaatgaacacaaagagcatggggggcgtgtcgaagaatgtcacagggcttcgctc

SEQ ID NO: 648 - RNA, 84 nt, synthetic construct
  source 1..84: mol_type = other RNA
tgccaagtgttccagccaccggcccagggcaatgaacacaaagagcatggggggcgtgtcgaagaatgtcacagggctcctctc

SEQ ID NO: 649 - RNA, 84 nt, synthetic construct
  source 1..84: mol_type = other RNA
tgccaagtgttccagccaccggcccagggcaatgaacacaaagagcatggggggcgtgtcgaagaatgtcacagggctacgctc

SEQ ID NO: 650 - RNA, 84 nt, synthetic construct
  source 1..84: mol_type = other RNA
tgccaagtgttccagccaccggcccagggcaatgaacacaaagagcatggggggcgtgtcgaagaatgtcacagggcttctctc

SEQ ID NO: 651 - RNA, 84 nt, synthetic construct
  source 1..84: mol_type = other RNA
tgccaagtgttccagccaccggcccagggcaatgaacacaaagagcatggggggcgtgtcgaagaatgtcacagggctgcgctc

SEQ ID NO: 652 - RNA, 85 nt, synthetic construct
  source 1..85: mol_type = other RNA
ttgccaagtgttccagccaccggcccagggcaatgaacacaaagagcatggggggcgtgtcgaagaatgtcacagggctacgctc

SEQ ID NO: 653 - RNA, 85 nt, synthetic construct
  source 1..85: mol_type = other RNA
ttgccaagtgttccagccaccggcccagggcaatgaacacaaagagcatggggggcgtgtcgaagaatgtcacagggcttctctc

SEQ ID NO: 654 - RNA, 85 nt, synthetic construct
  source 1..85: mol_type = other RNA
ttgccaagtgttccagccaccggcccagggcaatgaacacaaagagcatggggggcgtgtcgaagaatgtcacagggctcctctc

SEQ ID NO: 655 - RNA, 85 nt, synthetic construct
  source 1..85: mol_type = other RNA
ttgccaagtgttccagccaccggcccagggcaatgaacacaaagagcatggggggcgtgtcgaagaatgtcacagggctgcgctc

SEQ ID NO: 656 - RNA, 85 nt, synthetic construct
  source 1..85: mol_type = other RNA
ttgccaagtgttccagccaccggcccagggcaatgaacacaaagagcatggggggcgtgtcgaagaatgtcacagggcttcgctc

SEQ ID NO: 657 - RNA, 86 nt, synthetic construct
  source 1..86: mol_type = other RNA
tttgccaagtgttccagccaccggcccagggcaatgaacacaaagagcatggggggcgtgtcgaagaatgtcacagggctacgctc

SEQ ID NO: 658 - RNA, 86 nt, synthetic construct
  source 1..86: mol_type = other RNA
tttgccaagtgttccagccaccggcccagggcaatgaacacaaagagcatggggggcgtgtcgaagaatgtcacagggctgcgctc

SEQ ID NO: 659 - RNA, 86 nt, synthetic construct
  source 1..86: mol_type = other RNA
tttgccaagtgttccagccaccggcccagggcaatgaacacaaagagcatggggggcgtgtcgaagaatgtcacagggcttctctc

SEQ ID NO: 660 - RNA, 86 nt, synthetic construct
  source 1..86: mol_type = other RNA
tttgccaagtgttccagccaccggcccagggcaatgaacacaaagagcatggggggcgtgtcgaagaatgtcacagggctcctctc

SEQ ID NO: 661 - RNA, 86 nt, synthetic construct
  source 1..86: mol_type = other RNA
tttgccaagtgttccagccaccggcccagggcaatgaacacaaagagcatggggggcgtgtcgaagaatgtcacagggcttcgctc

SEQ ID NO: 662 - RNA, 87 nt, synthetic construct
  source 1..87: mol_type = other RNA
ctttgccaagtgttccagccaccggcccagggcaatgaacacaaagagcatggggggcgtgtcgaagaatgtcacagggctcctctc

SEQ ID NO: 663 - RNA, 87 nt, synthetic construct
  source 1..87: mol_type = other RNA
ctttgccaagtgttccagccaccggcccagggcaatgaacacaaagagcatggggggcgtgtcgaagaatgtcacagggctacgctc

SEQ ID NO: 664 - RNA, 87 nt, synthetic construct
  source 1..87: mol_type = other RNA
ctttgccaagtgttccagccaccggcccagggcaatgaacacaaagagcatggggggcgtgtcgaagaatgtcacagggctgcgctc

SEQ ID NO: 665 - RNA, 87 nt, synthetic construct
  source 1..87: mol_type = other RNA
ctttgccaagtgttccagccaccggcccagggcaatgaacacaaagagcatggggggcgtgtcgaagaatgtcacagggcttcgctc

SEQ ID NO: 666 - RNA, 87 nt, synthetic construct
  source 1..87: mol_type = other RNA
ctttgccaagtgttccagccaccggcccagggcaatgaacacaaagagcatggggggcgtgtcgaagaatgtcacagggcttctctc

SEQ ID NO: 667 - RNA, 88 nt, synthetic construct
  source 1..88: mol_type = other RNA
cctttgccaagtgttccagccaccggcccagggcaatgaacacaaagagcatggggggcgtgtcgaagaatgtcacagggcttcgctc

SEQ ID NO: 668 - RNA, 88 nt, synthetic construct
  source 1..88: mol_type = other RNA
cctttgccaagtgttccagccaccggcccagggcaatgaacacaaagagcatggggggcgtgtcgaagaatgtcacagggctacgctc

SEQ ID NO: 669 - RNA, 88 nt, synthetic construct
  source 1..88: mol_type = other RNA
cctttgccaagtgttccagccaccggcccagggcaatgaacacaaagagcatggggggcgtgtcgaagaatgtcacagggcttctctc

SEQ ID NO: 670 - RNA, 88 nt, synthetic construct
  source 1..88: mol_type = other RNA
cctttgccaagtgttccagccaccggcccagggcaatgaacacaaagagcatggggggcgtgtcgaagaatgtcacagggctgcgctc

SEQ ID NO: 671 - RNA, 88 nt, synthetic construct
  source 1..88: mol_type = other RNA
cctttgccaagtgttccagccaccggcccagggcaatgaacacaaagagcatggggggcgtgtcgaagaatgtcacagggctcctctc

SEQ ID NO: 672 - RNA, 89 nt, synthetic construct
  source 1..89: mol_type = other RNA
acctttgccaagtgttccagccaccggcccagggcaatgaacacaaagagcatggggggcgtgtcgaagaatgtcacagggctgcgctc

SEQ ID NO: 673 - RNA, 89 nt, synthetic construct
  source 1..89: mol_type = other RNA
acctttgccaagtgttccagccaccggcccagggcaatgaacacaaagagcatggggggcgtgtcgaagaatgtcacagggctacgctc

SEQ ID NO: 674 - RNA, 89 nt, synthetic construct
  source 1..89: mol_type = other RNA
acctttgccaagtgttccagccaccggcccagggcaatgaacacaaagagcatggggggcgtgtcgaagaatgtcacagggctcctctc

SEQ ID NO: 675 - RNA, 89 nt, synthetic construct
  source 1..89: mol_type = other RNA
acctttgccaagtgttccagccaccggcccagggcaatgaacacaaagagcatggggggcgtgtcgaagaatgtcacagggcttctctc

SEQ ID NO: 676 - RNA, 89 nt, synthetic construct
  source 1..89: mol_type = other RNA
acctttgccaagtgttccagccaccggcccagggcaatgaacacaaagagcatggggggcgtgtcgaagaatgtcacagggcttcgctc

SEQ ID NO: 677 - RNA, 90 nt, synthetic construct
  source 1..90: mol_type = other RNA
tacctttgccaagtgttccagccaccggcccagggcaatgaacacaaagagcatggggggcgtgtcgaagaatgtcacagggctacgctc

SEQ ID NO: 678 - RNA, 90 nt, synthetic construct
  source 1..90: mol_type = other RNA
tacctttgccaagtgttccagccaccggcccagggcaatgaacacaaagagcatggggggcgtgtcgaagaatgtcacagggctcctctc

SEQ ID NO: 679 - RNA, 90 nt, synthetic construct
  source 1..90: mol_type = other RNA
tacctttgccaagtgttccagccaccggcccagggcaatgaacacaaagagcatggggggcgtgtcgaagaatgtcacagggcttcgctc

SEQ ID NO: 680 - RNA, 90 nt, synthetic construct
  source 1..90: mol_type = other RNA
tacctttgccaagtgttccagccaccggcccagggcaatgaacacaaagagcatggggggcgtgtcgaagaatgtcacagggcttctctc

SEQ ID NO: 681 - RNA, 90 nt, synthetic construct
  source 1..90: mol_type = other RNA
tacctttgccaagtgttccagccaccggcccagggcaatgaacacaaagagcatggggggcgtgtcgaagaatgtcacagggctgcgctc

SEQ ID NO: 682 - RNA, 91 nt, synthetic construct
  source 1..91: mol_type = other RNA
ttacctttgccaagtgttccagccaccggcccagggcaatgaacacaaagagcatggggggcgtgtcgaagaatgtcacagggctcctctc

SEQ ID NO: 683 - RNA, 91 nt, synthetic construct
  source 1..91: mol_type = other RNA
ttacctttgccaagtgttccagccaccggcccagggcaatgaacacaaagagcatggggggcgtgtcgaagaatgtcacagggcttcgctc

SEQ ID NO: 684 - RNA, 91 nt, synthetic construct
  source 1..91: mol_type = other RNA
ttacctttgccaagtgttccagccaccggcccagggcaatgaacacaaagagcatggggggcgtgtcgaagaatgtcacagggctgcgctc

SEQ ID NO: 685 - RNA, 91 nt, synthetic construct
  source 1..91: mol_type = other RNA
ttacctttgccaagtgttccagccaccggcccagggcaatgaacacaaagagcatggggggcgtgtcgaagaatgtcacagggctacgctc

SEQ ID NO: 686 - RNA, 91 nt, synthetic construct
  source 1..91: mol_type = other RNA
ttacctttgccaagtgttccagccaccggcccagggcaatgaacacaaagagcatggggggcgtgtcgaagaatgtcacagggcttctctc

SEQ ID NO: 687 - RNA, 92 nt, synthetic construct
  source 1..92: mol_type = other RNA
gttacctttgccaagtgttccagccaccggcccagggcaatgaacacaaagagcatggggggcgtgtcgaagaatgtcacagggcttcgctc

SEQ ID NO: 688 - RNA, 92 nt, synthetic construct
  source 1..92: mol_type = other RNA
gttacctttgccaagtgttccagccaccggcccagggcaatgaacacaaagagcatggggggcgtgtcgaagaatgtcacagggcttctctc

SEQ ID NO: 689 - RNA, 92 nt, synthetic construct
  source 1..92: mol_type = other RNA
gttacctttgccaagtgttccagccaccggcccagggcaatgaacacaaagagcatggggggcgtgtcgaagaatgtcacagggctacgctc

SEQ ID NO: 690 - RNA, 92 nt, synthetic construct
  source 1..92: mol_type = other RNA
gttacctttgccaagtgttccagccaccggcccagggcaatgaacacaaagagcatggggggcgtgtcgaagaatgtcacagggctcctctc

SEQ ID NO: 691 - RNA, 92 nt, synthetic construct
  source 1..92: mol_type = other RNA
gttacctttgccaagtgttccagccaccggcccagggcaatgaacacaaagagcatggggggcgtgtcgaagaatgtcacagggctgcgctc

SEQ ID NO: 692 - RNA, 93 nt, synthetic construct
  source 1..93: mol_type = other RNA
tgttacctttgccaagtgttccagccaccggcccagggcaatgaacacaaagagcatggggggcgtgtcgaagaatgtcacagggcttctctc

SEQ ID NO: 693 - RNA, 93 nt, synthetic construct
  source 1..93: mol_type = other RNA
tgttacctttgccaagtgttccagccaccggcccagggcaatgaacacaaagagcatggggggcgtgtcgaagaatgtcacagggcttcgctc

SEQ ID NO: 694 - RNA, 93 nt, synthetic construct
  source 1..93: mol_type = other RNA
tgttacctttgccaagtgttccagccaccggcccagggcaatgaacacaaagagcatggggggcgtgtcgaagaatgtcacagggctcctctc

SEQ ID NO: 695 - RNA, 93 nt, synthetic construct
  source 1..93: mol_type = other RNA
tgttacctttgccaagtgttccagccaccggcccagggcaatgaacacaaagagcatggggggcgtgtcgaagaatgtcacagggctacgctc

SEQ ID NO: 696 - RNA, 93 nt, synthetic construct
  source 1..93: mol_type = other RNA
tgttacctttgccaagtgttccagccaccggcccagggcaatgaacacaaagagcatggggggcgtgtcgaagaatgtcacagggctgcgctc

SEQ ID NO: 697 - RNA, 94 nt, synthetic construct
  source 1..94: mol_type = other RNA
ctgttacctttgccaagtgttccagccaccggcccagggcaatgaacacaaagagcatggggggcgtgtcgaagaatgtcacagggctcctctc

SEQ ID NO: 698 - RNA, 94 nt, synthetic construct
  source 1..94: mol_type = other RNA
ctgttacctttgccaagtgttccagccaccggcccagggcaatgaacacaaagagcatggggggcgtgtcgaagaatgtcacagggcttcgctc

SEQ ID NO: 699 - RNA, 94 nt, synthetic construct
  source 1..94: mol_type = other RNA
ctgttacctttgccaagtgttccagccaccggcccagggcaatgaacacaaagagcatggggggcgtgtcgaagaatgtcacagggcttctctc

SEQ ID NO: 700 - RNA, 94 nt, synthetic construct
  source 1..94: mol_type = other RNA
ctgttacctttgccaagtgttccagccaccggcccagggcaatgaacacaaagagcatggggggcgtgtcgaagaatgtcacagggctgcgctc

SEQ ID NO: 701 - RNA, 94 nt, synthetic construct
  source 1..94: mol_type = other RNA
ctgttacctttgccaagtgttccagccaccggcccagggcaatgaacacaaagagcatggggggcgtgtcgaagaatgtcacagggctacgctc

SEQ ID NO: 702 - RNA, 95 nt, synthetic construct
  source 1..95: mol_type = other RNA
gctgttacctttgccaagtgttccagccaccggcccagggcaatgaacacaaagagcatggggggcgtgtcgaagaatgtcacagggcttctctc

SEQ ID NO: 703 - RNA, 95 nt, synthetic construct
  source 1..95: mol_type = other RNA
gctgttacctttgccaagtgttccagccaccggcccagggcaatgaacacaaagagcatggggggcgtgtcgaagaatgtcacagggctcctctc

SEQ ID NO: 704 - RNA, 95 nt, synthetic construct
  source 1..95: mol_type = other RNA
gctgttacctttgccaagtgttccagccaccggcccagggcaatgaacacaaagagcatggggggcgtgtcgaagaatgtcacagggcttcgctc

SEQ ID NO: 705 - RNA, 95 nt, synthetic construct
  source 1..95: mol_type = other RNA
gctgttacctttgccaagtgttccagccaccggcccagggcaatgaacacaaagagcatggggggcgtgtcgaagaatgtcacagggctacgctc

SEQ ID NO: 706 - RNA, 95 nt, synthetic construct
  source 1..95: mol_type = other RNA
gctgttacctttgccaagtgttccagccaccggcccagggcaatgaacacaaagagcatggggggcgtgtcgaagaatgtcacagggctgcgctc

SEQ ID NO: 707 - RNA, 96 nt, synthetic construct
  source 1..96: mol_type = other RNA
tgctgttacctttgccaagtgttccagccaccggcccagggcaatgaacacaaagagcatggggggcgtgtcgaagaatgtcacagggcttctctc

SEQ ID NO: 708 - RNA, 96 nt, synthetic construct
  source 1..96: mol_type = other RNA
tgctgttacctttgccaagtgttccagccaccggcccagggcaatgaacacaaagagcatggggggcgtgtcgaagaatgtcacagggctcctctc

SEQ ID NO: 709 - RNA, 96 nt, synthetic construct
  source 1..96: mol_type = other RNA
tgctgttacctttgccaagtgttccagccaccggcccagggcaatgaacacaaagagcatggggggcgtgtcgaagaatgtcacagggctacgctc

SEQ ID NO: 710 - RNA, 96 nt, synthetic construct
  source 1..96: mol_type = other RNA
tgctgttacctttgccaagtgttccagccaccggcccagggcaatgaacacaaagagcatggggggcgtgtcgaagaatgtcacagggctgcgctc

SEQ ID NO: 711 - RNA, 96 nt, synthetic construct
  source 1..96: mol_type = other RNA
tgctgttacctttgccaagtgttccagccaccggcccagggcaatgaacacaaagagcatggggggcgtgtcgaagaatgtcacagggcttcgctc

SEQ ID NO: 712 - RNA, 97 nt, synthetic construct
  source 1..97: mol_type = other RNA
ctgctgttacctttgccaagtgttccagccaccggcccagggcaatgaacacaaagagcatggggggcgtgtcgaagaatgtcacagggctcctctc

SEQ ID NO: 713 - RNA, 97 nt, synthetic construct
  source 1..97: mol_type = other RNA
ctgctgttacctttgccaagtgttccagccaccggcccagggcaatgaacacaaagagcatggggggcgtgtcgaagaatgtcacagggctacgctc

SEQ ID NO: 714 - RNA, 97 nt, synthetic construct
  source 1..97: mol_type = other RNA
ctgctgttacctttgccaagtgttccagccaccggcccagggcaatgaacacaaagagcatggggggcgtgtcgaagaatgtcacagggcttctctc

SEQ ID NO: 715 - RNA, 97 nt, synthetic construct
  source 1..97: mol_type = other RNA
ctgctgttacctttgccaagtgttccagccaccggcccagggcaatgaacacaaagagcatggggggcgtgtcgaagaatgtcacagggctgcgctc

SEQ ID NO: 716 - RNA, 97 nt, synthetic construct
  source 1..97: mol_type = other RNA
ctgctgttacctttgccaagtgttccagccaccggcccagggcaatgaacacaaagagcatggggggcgtgtcgaagaatgtcacagggcttcgctc

SEQ ID NO: 717 - RNA, 98 nt, synthetic construct
  source 1..98: mol_type = other RNA
gctgctgttacctttgccaagtgttccagccaccggcccagggcaatgaacacaaagagcatggggggcgtgtcgaagaatgtcacagggcttctctc

SEQ ID NO: 718 - RNA, 98 nt, synthetic construct
  source 1..98: mol_type = other RNA
gctgctgttacctttgccaagtgttccagccaccggcccagggcaatgaacacaaagagcatggggggcgtgtcgaagaatgtcacagggctgcgctc

SEQ ID NO: 719 - RNA, 98 nt, synthetic construct
  source 1..98: mol_type = other RNA
gctgctgttacctttgccaagtgttccagccaccggcccagggcaatgaacacaaagagcatggggggcgtgtcgaagaatgtcacagggcttcgctc

SEQ ID NO: 720 - RNA, 98 nt, synthetic construct
  source 1..98: mol_type = other RNA
gctgctgttacctttgccaagtgttccagccaccggcccagggcaatgaacacaaagagcatggggggcgtgtcgaagaatgtcacagggctcctctc

SEQ ID NO: 721 - RNA, 98 nt, synthetic construct
  source 1..98: mol_type = other RNA
gctgctgttacctttgccaagtgttccagccaccggcccagggcaatgaacacaaagagcatggggggcgtgtcgaagaatgtcacagggctacgctc

SEQ ID NO: 722 - RNA, 99 nt, synthetic construct
  source 1..99: mol_type = other RNA
agctgctgttacctttgccaagtgttccagccaccggcccagggcaatgaacacaaagagcatggggggcgtgtcgaagaatgtcacagggctcctctc

SEQ ID NO: 723 - RNA, 99 nt, synthetic construct
  source 1..99: mol_type = other RNA
agctgctgttacctttgccaagtgttccagccaccggcccagggcaatgaacacaaagagcatggggggcgtgtcgaagaatgtcacagggcttctctc

SEQ ID NO: 724 - RNA, 99 nt, synthetic construct
  source 1..99: mol_type = other RNA
agctgctgttacctttgccaagtgttccagccaccggcccagggcaatgaacacaaagagcatggggggcgtgtcgaagaatgtcacagggcttcgctc

SEQ ID NO: 725 - RNA, 99 nt, synthetic construct
  source 1..99: mol_type = other RNA
agctgctgttacctttgccaagtgttccagccaccggcccagggcaatgaacacaaagagcatggggggcgtgtcgaagaatgtcacagggctgcgctc

SEQ ID NO: 726 - RNA, 99 nt, synthetic construct
  source 1..99: mol_type = other RNA
agctgctgttacctttgccaagtgttccagccaccggcccagggcaatgaacacaaagagcatggggggcgtgtcgaagaatgtcacagggctacgctc

SEQ ID NO: 727 - RNA, 100 nt, synthetic construct
  source 1..100: mol_type = other RNA
aagctgctgttacctttgccaagtgttccagccaccggcccagggcaatgaacacaaagagcatggggggcgtgtcgaagaatgtcacagggctgcgctc

SEQ ID NO: 728 - RNA, 100 nt, synthetic construct
  source 1..100: mol_type = other RNA
aagctgctgttacctttgccaagtgttccagccaccggcccagggcaatgaacacaaagagcatggggggcgtgtcgaagaatgtcacagggctcctctc

SEQ ID NO: 729 - RNA, 100 nt, synthetic construct
  source 1..100: mol_type = other RNA
aagctgctgttacctttgccaagtgttccagccaccggcccagggcaatgaacacaaagagcatggggggcgtgtcgaagaatgtcacagggctacgctc

SEQ ID NO: 730 - RNA, 100 nt, synthetic construct
  source 1..100: mol_type = other RNA
aagctgctgttacctttgccaagtgttccagccaccggcccagggcaatgaacacaaagagcatggggggcgtgtcgaagaatgtcacagggcttctctc

SEQ ID NO: 731 - RNA, 100 nt, synthetic construct
  source 1..100: mol_type = other RNA
aagctgctgttacctttgccaagtgttccagccaccggcccagggcaatgaacacaaagagcatggggggcgtgtcgaagaatgtcacagggcttcgctc

SEQ ID NO: 732 - RNA, 20 nt, synthetic construct
  source 1..20: mol_type = other RNA
ctcttttctgaacctgaagc

SEQ ID NO: 733 - RNA, 20 nt, synthetic construct
  source 1..20: mol_type = other RNA
ttttctgaacctgaagctgc

SEQ ID NO: 734 - RNA, 16 nt, synthetic construct
  source 1..16: mol_type = other RNA
tttgtgttcattgccc

SEQ ID NO: 735 - RNA, 17 nt, synthetic construct
  source 1..17: mol_type = other RNA
ctttgtgttcattgccc

SEQ ID NO: 736 - RNA, 18 nt, synthetic construct
  source 1..18: mol_type = other RNA
tctttgtgttcattgccc

SEQ ID NO: 737 - RNA, 19 nt, synthetic construct
  source 1..19: mol_type = other RNA
ctctttgtgttcattgccc

SEQ ID NO: 738 - RNA, 20 nt, synthetic construct
  source 1..20: mol_type = other RNA
gctctttgtgttcattgccc

SEQ ID NO: 739 - RNA, 21 nt, synthetic construct
  source 1..21: mol_type = other RNA
tgctctttgtgttcattgccc

SEQ ID NO: 740 - RNA, 22 nt, synthetic construct
  source 1..22: mol_type = other RNA
atgctctttgtgttcattgccc

SEQ ID NO: 741-746 - skipped (6 entries)

SEQ ID NO: 747 - RNA, 10 nt, synthetic construct
  source 1..10: mol_type = other RNA
caatgaacac

SEQ ID NO: 748 - RNA, 11 nt, synthetic construct
  source 1..11: mol_type = other RNA
caatgaacaca

SEQ ID NO: 749 - RNA, 12 nt, synthetic construct
  source 1..12: mol_type = other RNA
caatgaacacaa

SEQ ID NO: 750 - RNA, 13 nt, synthetic construct
  source 1..13: mol_type = other RNA
caatgaacacaaa

SEQ ID NO: 751 - RNA, 14 nt, synthetic construct
  source 1..14: mol_type = other RNA
caatgaacacaaag

SEQ ID NO: 752 - RNA, 15 nt, synthetic construct
  source 1..15: mol_type = other RNA
caatgaacacaaaga

SEQ ID NO: 753 - RNA, 16 nt, synthetic construct
  source 1..16: mol_type = other RNA
caatgaacacaaagag

SEQ ID NO: 754 - RNA, 17 nt, synthetic construct
  source 1..17: mol_type = other RNA
caatgaacacaaagagc

SEQ ID NO: 755 - RNA, 18 nt, synthetic construct
  source 1..18: mol_type = other RNA
caatgaacacaaagagca

SEQ ID NO: 756 - RNA, 19 nt, synthetic construct
  source 1..19: mol_type = other RNA
caatgaacacaaagagcat

SEQ ID NO: 757 - RNA, 10 nt, synthetic construct
  source 1..10: mol_type = other RNA
cggcctaagg

SEQ ID NO: 758 - RNA, 10 nt, synthetic construct
  source 1..10: mol_type = other RNA
cggccgaggg

SEQ ID NO: 759 - RNA, 10 nt, synthetic construct
  source 1..10: mol_type = other RNA
cggcccaggg

SEQ ID NO: 760 - RNA, 10 nt, synthetic construct
  source 1..10: mol_type = other RNA
cggcctaggg

SEQ ID NO: 761 - RNA, 10 nt, synthetic construct
  source 1..10: mol_type = other RNA
cggccaaggg

SEQ ID NO: 762 - RNA, 11 nt, synthetic construct
  source 1..11: mol_type = other RNA
ccggcctaggg

SEQ ID NO: 763 - RNA, 11 nt, synthetic construct
  source 1..11: mol_type = other RNA
ccggccaaggg

SEQ ID NO: 764 - RNA, 11 nt, synthetic construct
  source 1..11: mol_type = other RNA
ccggcccaggg

SEQ ID NO: 765 - RNA, 11 nt, synthetic construct
  source 1..11: mol_type = other RNA
ccggcctaagg

SEQ ID NO: 766 - RNA, 11 nt, synthetic construct
  source 1..11: mol_type = other RNA
ccggccgaggg

SEQ ID NO: 767 - RNA, 12 nt, synthetic construct
  source 1..12: mol_type = other RNA
accggcccaggg

SEQ ID NO: 768 - RNA, 12 nt, synthetic construct
  source 1..12: mol_type = other RNA
accggcctaagg

SEQ ID NO: 769 - RNA, 12 nt, synthetic construct
  source 1..12: mol_type = other RNA
accggccgaggg

SEQ ID NO: 770 - RNA, 12 nt, synthetic construct
  source 1..12: mol_type = other RNA
accggcctaggg

SEQ ID NO: 771 - RNA, 12 nt, synthetic construct
  source 1..12: mol_type = other RNA
accggccaaggg

SEQ ID NO: 772 - RNA, 13 nt, synthetic construct
  source 1..13: mol_type = other RNA
caccggccaaggg

SEQ ID NO: 773 - RNA, 13 nt, synthetic construct
  source 1..13: mol_type = other RNA
caccggcctaggg

SEQ ID NO: 774 - RNA, 13 nt, synthetic construct
  source 1..13: mol_type = other RNA
caccggcccaggg

SEQ ID NO: 775 - RNA, 13 nt, synthetic construct
  source 1..13: mol_type = other RNA
caccggccgaggg

SEQ ID NO: 776 - RNA, 13 nt, synthetic construct
  source 1..13: mol_type = other RNA
caccggcctaagg

SEQ ID NO: 777 - RNA, 14 nt, synthetic construct
  source 1..14: mol_type = other RNA
ccaccggcccaggg

SEQ ID NO: 778 - RNA, 14 nt, synthetic construct
  source 1..14: mol_type = other RNA
ccaccggcctaagg

SEQ ID NO: 779 - RNA, 14 nt, synthetic construct
  source 1..14: mol_type = other RNA
ccaccggccgaggg

SEQ ID NO: 780 - RNA, 14 nt, synthetic construct
  source 1..14: mol_type = other RNA
ccaccggcctaggg

SEQ ID NO: 781 - RNA, 14 nt, synthetic construct
  source 1..14: mol_type = other RNA
ccaccggccaaggg

SEQ ID NO: 782 - RNA, 15 nt, synthetic construct
  source 1..15: mol_type = other RNA
gccaccggcctaggg

SEQ ID NO: 783 - RNA, 15 nt, synthetic construct
  source 1..15: mol_type = other RNA
gccaccggccaaggg

SEQ ID NO: 784 - RNA, 15 nt, synthetic construct
  source 1..15: mol_type = other RNA
gccaccggccgaggg

SEQ ID NO: 785 - RNA, 15 nt, synthetic construct
  source 1..15: mol_type = other RNA
gccaccggcccaggg

SEQ ID NO: 786 - RNA, 15 nt, synthetic construct
  source 1..15: mol_type = other RNA
gccaccggcctaagg

SEQ ID NO: 787 - RNA, 16 nt, synthetic construct
  source 1..16: mol_type = other RNA
agccaccggcctaagg

SEQ ID NO: 788 - RNA, 16 nt, synthetic construct
  source 1..16: mol_type = other RNA
agccaccggcccaggg

SEQ ID NO: 789 - RNA, 16 nt, synthetic construct
  source 1..16: mol_type = other RNA
agccaccggccgaggg

SEQ ID NO: 790 - RNA, 16 nt, synthetic construct
  source 1..16: mol_type = other RNA
agccaccggccaaggg

SEQ ID NO: 791 - RNA, 16 nt, synthetic construct
  source 1..16: mol_type = other RNA
agccaccggcctaggg

SEQ ID NO: 792 - RNA, 17 nt, synthetic construct
  source 1..17: mol_type = other RNA
cagccaccggcctaagg

SEQ ID NO: 793 - RNA, 17 nt, synthetic construct
  source 1..17: mol_type = other RNA
cagccaccggcctaggg

SEQ ID NO: 794 - RNA, 17 nt, synthetic construct
  source 1..17: mol_type = other RNA
cagccaccggccaaggg

SEQ ID NO: 795 - RNA, 17 nt, synthetic construct
  source 1..17: mol_type = other RNA
cagccaccggccgaggg

SEQ ID NO: 796 - RNA, 17 nt, synthetic construct
  source 1..17: mol_type = other RNA
cagccaccggcccaggg

SEQ ID NO: 797 - RNA, 18 nt, synthetic construct
  source 1..18: mol_type = other RNA
ccagccaccggcccaggg

SEQ ID NO: 798 - RNA, 18 nt, synthetic construct
  source 1..18: mol_type = other RNA
ccagccaccggcctaggg

SEQ ID NO: 799 - RNA, 18 nt, synthetic construct
  source 1..18: mol_type = other RNA
ccagccaccggcctaagg

SEQ ID NO: 800 - RNA, 18 nt, synthetic construct
  source 1..18: mol_type = other RNA
ccagccaccggccgaggg

SEQ ID NO: 801 - RNA, 18 nt, synthetic construct
  source 1..18: mol_type = other RNA
ccagccaccggccaaggg

SEQ ID NO: 802 - RNA, 19 nt, synthetic construct
  source 1..19: mol_type = other RNA
tccagccaccggcccaggg

SEQ ID NO: 803 - RNA, 19 nt, synthetic construct
  source 1..19: mol_type = other RNA
tccagccaccggccgaggg

SEQ ID NO: 804 - RNA, 19 nt, synthetic construct
  source 1..19: mol_type = other RNA
tccagccaccggccaaggg

SEQ ID NO: 805 - RNA, 19 nt, synthetic construct
  source 1..19: mol_type = other RNA
tccagccaccggcctaggg

SEQ ID NO: 806 - RNA, 19 nt, synthetic construct
  source 1..19: mol_type = other RNA
tccagccaccggcctaagg

SEQ ID NO: 807 - RNA, 20 nt, synthetic construct
  source 1..20: mol_type = other RNA
ttccagccaccggcctaggg

SEQ ID NO: 808 - RNA, 20 nt, synthetic construct
  source 1..20: mol_type = other RNA
ttccagccaccggccaaggg

SEQ ID NO: 809 - RNA, 20 nt, synthetic construct
  source 1..20: mol_type = other RNA
ttccagccaccggcccaggg

SEQ ID NO: 810 - RNA, 20 nt, synthetic construct
  source 1..20: mol_type = other RNA
ttccagccaccggccgaggg

SEQ ID NO: 811 - RNA, 20 nt, synthetic construct
  source 1..20: mol_type = other RNA
ttccagccaccggcctaagg

SEQ ID NO: 812 - RNA, 21 nt, synthetic construct
  source 1..21: mol_type = other RNA
gttccagccaccggcccaggg

SEQ ID NO: 813 - RNA, 21 nt, synthetic construct
  source 1..21: mol_type = other RNA
gttccagccaccggccaaggg

SEQ ID NO: 814 - RNA, 21 nt, synthetic construct
  source 1..21: mol_type = other RNA
gttccagccaccggcctaggg

SEQ ID NO: 815 - RNA, 21 nt, synthetic construct
  source 1..21: mol_type = other RNA
gttccagccaccggcctaagg

SEQ ID NO: 816 - RNA, 21 nt, synthetic construct
  source 1..21: mol_type = other RNA
gttccagccaccggccgaggg

SEQ ID NO: 817 - RNA, 22 nt, synthetic construct
  source 1..22: mol_type = other RNA
tgttccagccaccggcctaggg

SEQ ID NO: 818 - RNA, 22 nt, synthetic construct
  source 1..22: mol_type = other RNA
tgttccagccaccggccgaggg

SEQ ID NO: 819 - RNA, 22 nt, synthetic construct
  source 1..22: mol_type = other RNA
tgttccagccaccggcctaagg

SEQ ID NO: 820 - RNA, 22 nt, synthetic construct
  source 1..22: mol_type = other RNA
tgttccagccaccggccaaggg

SEQ ID NO: 821 - RNA, 22 nt, synthetic construct
  source 1..22: mol_type = other RNA
tgttccagccaccggcccaggg

SEQ ID NO: 822 - RNA, 23 nt, synthetic construct
  source 1..23: mol_type = other RNA
gtgttccagccaccggcctaagg

SEQ ID NO: 823 - RNA, 23 nt, synthetic construct
  source 1..23: mol_type = other RNA
gtgttccagccaccggcccaggg

SEQ ID NO: 824 - RNA, 23 nt, synthetic construct
  source 1..23: mol_type = other RNA
gtgttccagccaccggcctaggg

SEQ ID NO: 825 - RNA, 23 nt, synthetic construct
  source 1..23: mol_type = other RNA
gtgttccagccaccggccaaggg

SEQ ID NO: 826 - RNA, 23 nt, synthetic construct
  source 1..23: mol_type = other RNA
gtgttccagccaccggccgaggg

SEQ ID NO: 827 - RNA, 24 nt, synthetic construct
  source 1..24: mol_type = other RNA
agtgttccagccaccggcctaggg

SEQ ID NO: 828 - RNA, 24 nt, synthetic construct
  source 1..24: mol_type = other RNA
agtgttccagccaccggccaaggg

SEQ ID NO: 829 - RNA, 24 nt, synthetic construct
  source 1..24: mol_type = other RNA
agtgttccagccaccggcccaggg

SEQ ID NO: 830 - RNA, 24 nt, synthetic construct
  source 1..24: mol_type = other RNA
agtgttccagccaccggccgaggg

SEQ ID NO: 831 - RNA, 24 nt, synthetic construct
  source 1..24: mol_type = other RNA
agtgttccagccaccggcctaagg

SEQ ID NO: 832 - RNA, 25 nt, synthetic construct
  source 1..25: mol_type = other RNA
aagtgttccagccaccggccaaggg

SEQ ID NO: 833 - RNA, 25 nt, synthetic construct
  source 1..25: mol_type = other RNA
aagtgttccagccaccggcccaggg

SEQ ID NO: 834 - RNA, 25 nt, synthetic construct
  source 1..25: mol_type = other RNA
aagtgttccagccaccggccgaggg

SEQ ID NO: 835 - RNA, 25 nt, synthetic construct
  source 1..25: mol_type = other RNA
aagtgttccagccaccggcctaagg

SEQ ID NO: 836 - RNA, 25 nt, synthetic construct
  source 1..25: mol_type = other RNA
aagtgttccagccaccggcctaggg

SEQ ID NO: 837 - RNA, 26 nt, synthetic construct
  source 1..26: mol_type = other RNA
caagtgttccagccaccggcctaagg

SEQ ID NO: 838 - RNA, 26 nt, synthetic construct
  source 1..26: mol_type = other RNA
caagtgttccagccaccggccaaggg

SEQ ID NO: 839 - RNA, 26 nt, synthetic construct
  source 1..26: mol_type = other RNA
caagtgttccagccaccggcctaggg

SEQ ID NO: 840 - RNA, 26 nt, synthetic construct
  source 1..26: mol_type = other RNA
caagtgttccagccaccggcccaggg

SEQ ID NO: 841 - RNA, 26 nt, synthetic construct
  source 1..26: mol_type = other RNA
caagtgttccagccaccggccgaggg

SEQ ID NO: 842 - RNA, 27 nt, synthetic construct
  source 1..27: mol_type = other RNA
ccaagtgttccagccaccggcctaagg

SEQ ID NO: 843 - RNA, 27 nt, synthetic construct
  source 1..27: mol_type = other RNA
ccaagtgttccagccaccggccaaggg

SEQ ID NO: 844 - RNA, 27 nt, synthetic construct
  source 1..27: mol_type = other RNA
ccaagtgttccagccaccggccgaggg

SEQ ID NO: 845 - RNA, 27 nt, synthetic construct
  source 1..27: mol_type = other RNA
ccaagtgttccagccaccggcccaggg

SEQ ID NO: 846 - RNA, 27 nt, synthetic construct
  source 1..27: mol_type = other RNA
ccaagtgttccagccaccggcctaggg

SEQ ID NO: 847 - RNA, 28 nt, synthetic construct
  source 1..28: mol_type = other RNA
gccaagtgttccagccaccggccaaggg

SEQ ID NO: 848 - RNA, 28 nt, synthetic construct
  source 1..28: mol_type = other RNA
gccaagtgttccagccaccggcccaggg

SEQ ID NO: 849 - RNA, 28 nt, synthetic construct
  source 1..28: mol_type = other RNA
gccaagtgttccagccaccggcctaagg

SEQ ID NO: 850 - RNA, 28 nt, synthetic construct
  source 1..28: mol_type = other RNA
gccaagtgttccagccaccggcctaggg

SEQ ID NO: 851 - RNA, 28 nt, synthetic construct
  source 1..28: mol_type = other RNA
gccaagtgttccagccaccggccgaggg

SEQ ID NO: 852 - RNA, 29 nt, synthetic construct
  source 1..29: mol_type = other RNA
tgccaagtgttccagccaccggccaaggg

SEQ ID NO: 853 - RNA, 29 nt, synthetic construct
  source 1..29: mol_type = other RNA
tgccaagtgttccagccaccggcctaggg

SEQ ID NO: 854 - RNA, 29 nt, synthetic construct
  source 1..29: mol_type = other RNA
tgccaagtgttccagccaccggcccaggg

SEQ ID NO: 855 - RNA, 29 nt, synthetic construct
  source 1..29: mol_type = other RNA
tgccaagtgttccagccaccggcctaagg

SEQ ID NO: 856 - RNA, 29 nt, synthetic construct
  source 1..29: mol_type = other RNA
tgccaagtgttccagccaccggccgaggg

SEQ ID NO: 857 - RNA, 30 nt, synthetic construct
  source 1..30: mol_type = other RNA
ttgccaagtgttccagccaccggcccaggg

SEQ ID NO: 858 - RNA, 30 nt, synthetic construct
  source 1..30: mol_type = other RNA
ttgccaagtgttccagccaccggccgaggg

SEQ ID NO: 859 - RNA, 30 nt, synthetic construct
  source 1..30: mol_type = other RNA
ttgccaagtgttccagccaccggcctaggg

SEQ ID NO: 860 - RNA, 30 nt, synthetic construct
  source 1..30: mol_type = other RNA
ttgccaagtgttccagccaccggcctaagg

SEQ ID NO: 861 - RNA, 30 nt, synthetic construct
  source 1..30: mol_type = other RNA
ttgccaagtgttccagccaccggccaaggg

SEQ ID NO: 862 - RNA, 31 nt, synthetic construct
  source 1..31: mol_type = other RNA
tttgccaagtgttccagccaccggcccaggg

SEQ ID NO: 863 - RNA, 31 nt, synthetic construct
  source 1..31: mol_type = other RNA
tttgccaagtgttccagccaccggcctaggg

SEQ ID NO: 864 - RNA, 31 nt, synthetic construct
  source 1..31: mol_type = other RNA
tttgccaagtgttccagccaccggcctaagg

SEQ ID NO: 865 - RNA, 31 nt, synthetic construct
  source 1..31: mol_type = other RNA
tttgccaagtgttccagccaccggccgaggg

SEQ ID NO: 866 - RNA, 31 nt, synthetic construct
  source 1..31: mol_type = other RNA
tttgccaagtgttccagccaccggccaaggg

SEQ ID NO: 867 - RNA, 32 nt, synthetic construct
  source 1..32: mol_type = other RNA
ctttgccaagtgttccagccaccggcctaggg

SEQ ID NO: 868 - RNA, 32 nt, synthetic construct
  source 1..32: mol_type = other RNA
ctttgccaagtgttccagccaccggcctaagg

SEQ ID NO: 869 - RNA, 32 nt, synthetic construct
  source 1..32: mol_type = other RNA
ctttgccaagtgttccagccaccggccaaggg

SEQ ID NO: 870 - RNA, 32 nt, synthetic construct
  source 1..32: mol_type = other RNA
ctttgccaagtgttccagccaccggcccaggg

SEQ ID NO: 871 - RNA, 32 nt, synthetic construct
  source 1..32: mol_type = other RNA
ctttgccaagtgttccagccaccggccgaggg

SEQ ID NO: 872 - RNA, 33 nt, synthetic construct
  source 1..33: mol_type = other RNA
cctttgccaagtgttccagccaccggccgaggg

SEQ ID NO: 873 - RNA, 33 nt, synthetic construct
  source 1..33: mol_type = other RNA
cctttgccaagtgttccagccaccggcctaagg

SEQ ID NO: 874 - RNA, 33 nt, synthetic construct
  source 1..33: mol_type = other RNA
cctttgccaagtgttccagccaccggcccaggg

SEQ ID NO: 875 - RNA, 33 nt, synthetic construct
  source 1..33: mol_type = other RNA
cctttgccaagtgttccagccaccggccaaggg

SEQ ID NO: 876 - RNA, 33 nt, synthetic construct
  source 1..33: mol_type = other RNA
cctttgccaagtgttccagccaccggcctaggg

SEQ ID NO: 877 - RNA, 34 nt, synthetic construct
  source 1..34: mol_type = other RNA
acctttgccaagtgttccagccaccggccaaggg

SEQ ID NO: 878 - RNA, 34 nt, synthetic construct
  source 1..34: mol_type = other RNA
acctttgccaagtgttccagccaccggcctaggg

SEQ ID NO: 879 - RNA, 34 nt, synthetic construct
  source 1..34: mol_type = other RNA
acctttgccaagtgttccagccaccggccgaggg

SEQ ID NO: 880 - RNA, 34 nt, synthetic construct
  source 1..34: mol_type = other RNA
acctttgccaagtgttccagccaccggcctaagg

SEQ ID NO: 881 - RNA, 34 nt, synthetic construct
  source 1..34: mol_type = other RNA
acctttgccaagtgttccagccaccggcccaggg

SEQ ID NO: 882 - RNA, 35 nt, synthetic construct
  source 1..35: mol_type = other RNA
tacctttgccaagtgttccagccaccggccaaggg

SEQ ID NO: 883 - RNA, 35 nt, synthetic construct
  source 1..35: mol_type = other RNA
tacctttgccaagtgttccagccaccggcctaggg

SEQ ID NO: 884 - RNA, 35 nt, synthetic construct
  source 1..35: mol_type = other RNA
tacctttgccaagtgttccagccaccggcctaagg

SEQ ID NO: 885 - RNA, 35 nt, synthetic construct
  source 1..35: mol_type = other RNA
tacctttgccaagtgttccagccaccggccgaggg

SEQ ID NO: 886 - RNA, 35 nt, synthetic construct
  source 1..35: mol_type = other RNA
tacctttgccaagtgttccagccaccggcccaggg

SEQ ID NO: 887 - RNA, 36 nt, synthetic construct
  source 1..36: mol_type = other RNA
ttacctttgccaagtgttccagccaccggcctaggg

SEQ ID NO: 888 - RNA, 36 nt, synthetic construct
  source 1..36: mol_type = other RNA
ttacctttgccaagtgttccagccaccggccgaggg

SEQ ID NO: 889 - RNA, 36 nt, synthetic construct
  source 1..36: mol_type = other RNA
ttacctttgccaagtgttccagccaccggccaaggg

SEQ ID NO: 890 - RNA, 36 nt, synthetic construct
  source 1..36: mol_type = other RNA
ttacctttgccaagtgttccagccaccggcccaggg

SEQ ID NO: 891 - RNA, 36 nt, synthetic construct
  source 1..36: mol_type = other RNA
ttacctttgccaagtgttccagccaccggcctaagg

SEQ ID NO: 892 - RNA, 37 nt, synthetic construct
  source 1..37: mol_type = other RNA
gttacctttgccaagtgttccagccaccggccaaggg

SEQ ID NO: 893 - RNA, 37 nt, synthetic construct
  source 1..37: mol_type = other RNA
gttacctttgccaagtgttccagccaccggccgaggg

SEQ ID NO: 894 - RNA, 37 nt, synthetic construct
  source 1..37: mol_type = other RNA
gttacctttgccaagtgttccagccaccggcctaagg

SEQ ID NO: 895 - RNA, 37 nt, synthetic construct
  source 1..37: mol_type = other RNA
gttacctttgccaagtgttccagccaccggcctaggg

SEQ ID NO: 896 - RNA, 37 nt, synthetic construct
  source 1..37: mol_type = other RNA
gttacctttgccaagtgttccagccaccggcccaggg

SEQ ID NO: 897 - RNA, 38 nt, synthetic construct
  source 1..38: mol_type = other RNA
tgttacctttgccaagtgttccagccaccggcctaagg

SEQ ID NO: 898 - RNA, 38 nt, synthetic construct
  source 1..38: mol_type = other RNA
tgttacctttgccaagtgttccagccaccggccgaggg

SEQ ID NO: 899 - RNA, 38 nt, synthetic construct
  source 1..38: mol_type = other RNA
tgttacctttgccaagtgttccagccaccggccaaggg

SEQ ID NO: 900 - RNA, 38 nt, synthetic construct
  source 1..38: mol_type = other RNA
tgttacctttgccaagtgttccagccaccggcccaggg

SEQ ID NO: 901 - RNA, 38 nt, synthetic construct
  source 1..38: mol_type = other RNA
tgttacctttgccaagtgttccagccaccggcctaggg

SEQ ID NO: 902 - RNA, 39 nt, synthetic construct
  source 1..39: mol_type = other RNA
ctgttacctttgccaagtgttccagccaccggccgaggg

SEQ ID NO: 903 - RNA, 39 nt, synthetic construct
  source 1..39: mol_type = other RNA
ctgttacctttgccaagtgttccagccaccggcccaggg

SEQ ID NO: 904 - RNA, 39 nt, synthetic construct
  source 1..39: mol_type = other RNA
ctgttacctttgccaagtgttccagccaccggccaaggg

SEQ ID NO: 905 - RNA, 39 nt, synthetic construct
  source 1..39: mol_type = other RNA
ctgttacctttgccaagtgttccagccaccggcctaggg

SEQ ID NO: 906 - RNA, 39 nt, synthetic construct
  source 1..39: mol_type = other RNA
ctgttacctttgccaagtgttccagccaccggcctaagg

SEQ ID NO: 907 - RNA, 40 nt, synthetic construct
  source 1..40: mol_type = other RNA
gctgttacctttgccaagtgttccagccaccggcctaggg

SEQ ID NO: 908 - RNA, 40 nt, synthetic construct
  source 1..40: mol_type = other RNA
gctgttacctttgccaagtgttccagccaccggcctaagg

SEQ ID NO: 909 - RNA, 40 nt, synthetic construct
  source 1..40: mol_type = other RNA
gctgttacctttgccaagtgttccagccaccggccgaggg

SEQ ID NO: 910 - RNA, 40 nt, synthetic construct
  source 1..40: mol_type = other RNA
gctgttacctttgccaagtgttccagccaccggcccaggg

SEQ ID NO: 911 - RNA, 40 nt, synthetic construct
  source 1..40: mol_type = other RNA
gctgttacctttgccaagtgttccagccaccggccaaggg

SEQ ID NO: 912 - RNA, 41 nt, synthetic construct
  source 1..41: mol_type = other RNA
tgctgttacctttgccaagtgttccagccaccggcctaagg

SEQ ID NO: 913 - RNA, 41 nt, synthetic construct
  source 1..41: mol_type = other RNA
tgctgttacctttgccaagtgttccagccaccggccaaggg

SEQ ID NO: 914 - RNA, 41 nt, synthetic construct
  source 1..41: mol_type = other RNA
tgctgttacctttgccaagtgttccagccaccggcccaggg

SEQ ID NO: 915 - RNA, 41 nt, synthetic construct
  source 1..41: mol_type = other RNA
tgctgttacctttgccaagtgttccagccaccggccgaggg

SEQ ID NO: 916 - RNA, 41 nt, synthetic construct
  source 1..41: mol_type = other RNA
tgctgttacctttgccaagtgttccagccaccggcctaggg

SEQ ID NO: 917 - RNA, 42 nt, synthetic construct
  source 1..42: mol_type = other RNA
ctgctgttacctttgccaagtgttccagccaccggcccaggg

SEQ ID NO: 918 - RNA, 42 nt, synthetic construct
  source 1..42: mol_type = other RNA
ctgctgttacctttgccaagtgttccagccaccggccgaggg

SEQ ID NO: 919 - RNA, 42 nt, synthetic construct
  source 1..42: mol_type = other RNA
ctgctgttacctttgccaagtgttccagccaccggcctaagg

SEQ ID NO: 920 - RNA, 42 nt, synthetic construct
  source 1..42: mol_type = other RNA
ctgctgttacctttgccaagtgttccagccaccggcctaggg

SEQ ID NO: 921 - RNA, 42 nt, synthetic construct
  source 1..42: mol_type = other RNA
ctgctgttacctttgccaagtgttccagccaccggccaaggg

SEQ ID NO: 922 - RNA, 43 nt, synthetic construct
  source 1..43: mol_type = other RNA
gctgctgttacctttgccaagtgttccagccaccggccaaggg

SEQ ID NO: 923 - RNA, 43 nt, synthetic construct
  source 1..43: mol_type = other RNA
gctgctgttacctttgccaagtgttccagccaccggccgaggg

SEQ ID NO: 924 - RNA, 43 nt, synthetic construct
  source 1..43: mol_type = other RNA
gctgctgttacctttgccaagtgttccagccaccggcccaggg

SEQ ID NO: 925 - RNA, 43 nt, synthetic construct
  source 1..43: mol_type = other RNA
gctgctgttacctttgccaagtgttccagccaccggcctaagg

SEQ ID NO: 926 - RNA, 43 nt, synthetic construct
  source 1..43: mol_type = other RNA
gctgctgttacctttgccaagtgttccagccaccggcctaggg

SEQ ID NO: 927 - RNA, 44 nt, synthetic construct
  source 1..44: mol_type = other RNA
agctgctgttacctttgccaagtgttccagccaccggcctaggg

SEQ ID NO: 928 - RNA, 44 nt, synthetic construct
  source 1..44: mol_type = other RNA
agctgctgttacctttgccaagtgttccagccaccggcccaggg

SEQ ID NO: 929 - RNA, 44 nt, synthetic construct
  source 1..44: mol_type = other RNA
agctgctgttacctttgccaagtgttccagccaccggccgaggg

SEQ ID NO: 930 - RNA, 44 nt, synthetic construct
  source 1..44: mol_type = other RNA
agctgctgttacctttgccaagtgttccagccaccggcctaagg

SEQ ID NO: 931 - RNA, 44 nt, synthetic construct
  source 1..44: mol_type = other RNA
agctgctgttacctttgccaagtgttccagccaccggccaaggg

SEQ ID NO: 932 - RNA, 45 nt, synthetic construct
  source 1..45: mol_type = other RNA
aagctgctgttacctttgccaagtgttccagccaccggcctaggg

SEQ ID NO: 933 - RNA, 45 nt, synthetic construct
  source 1..45: mol_type = other RNA
aagctgctgttacctttgccaagtgttccagccaccggcctaagg

SEQ ID NO: 934 - RNA, 45 nt, synthetic construct
  source 1..45: mol_type = other RNA
aagctgctgttacctttgccaagtgttccagccaccggccaaggg

SEQ ID NO: 935 - RNA, 45 nt, synthetic construct
  source 1..45: mol_type = other RNA
aagctgctgttacctttgccaagtgttccagccaccggccgaggg

SEQ ID NO: 936 - RNA, 45 nt, synthetic construct
  source 1..45: mol_type = other RNA
aagctgctgttacctttgccaagtgttccagccaccggcccaggg

SEQ ID NO: 937 - RNA, 46 nt, synthetic construct
  source 1..46: mol_type = other RNA
gaagctgctgttacctttgccaagtgttccagccaccggcccaggg

SEQ ID NO: 938 - RNA, 46 nt, synthetic construct
  source 1..46: mol_type = other RNA
gaagctgctgttacctttgccaagtgttccagccaccggccgaggg

SEQ ID NO: 939 - RNA, 46 nt, synthetic construct
  source 1..46: mol_type = other RNA
gaagctgctgttacctttgccaagtgttccagccaccggccaaggg

SEQ ID NO: 940 - RNA, 46 nt, synthetic construct
  source 1..46: mol_type = other RNA
gaagctgctgttacctttgccaagtgttccagccaccggcctaggg

SEQ ID NO: 941 - RNA, 46 nt, synthetic construct
  source 1..46: mol_type = other RNA
gaagctgctgttacctttgccaagtgttccagccaccggcctaagg

SEQ ID NO: 942 - RNA, 47 nt, synthetic construct
  source 1..47: mol_type = other RNA
tgaagctgctgttacctttgccaagtgttccagccaccggccaaggg

SEQ ID NO: 943 - RNA, 47 nt, synthetic construct
  source 1..47: mol_type = other RNA
tgaagctgctgttacctttgccaagtgttccagccaccggcctaagg

SEQ ID NO: 944 - RNA, 47 nt, synthetic construct
  source 1..47: mol_type = other RNA
tgaagctgctgttacctttgccaagtgttccagccaccggccgaggg

SEQ ID NO: 945 - RNA, 47 nt, synthetic construct
  source 1..47: mol_type = other RNA
tgaagctgctgttacctttgccaagtgttccagccaccggcctaggg

SEQ ID NO: 946 - RNA, 47 nt, synthetic construct
  source 1..47: mol_type = other RNA
tgaagctgctgttacctttgccaagtgttccagccaccggcccaggg

SEQ ID NO: 947 - RNA, 48 nt, synthetic construct
  source 1..48: mol_type = other RNA
ctgaagctgctgttacctttgccaagtgttccagccaccggccgaggg

SEQ ID NO: 948 - RNA, 48 nt, synthetic construct
  source 1..48: mol_type = other RNA
ctgaagctgctgttacctttgccaagtgttccagccaccggcctaagg

SEQ ID NO: 949 - RNA, 48 nt, synthetic construct
  source 1..48: mol_type = other RNA
ctgaagctgctgttacctttgccaagtgttccagccaccggccaaggg

SEQ ID NO: 950 - RNA, 48 nt, synthetic construct
  source 1..48: mol_type = other RNA
ctgaagctgctgttacctttgccaagtgttccagccaccggcccaggg

SEQ ID NO: 951 - RNA, 48 nt, synthetic construct
  source 1..48: mol_type = other RNA
ctgaagctgctgttacctttgccaagtgttccagccaccggcctaggg

SEQ ID NO: 952 - RNA, 49 nt, synthetic construct
  source 1..49: mol_type = other RNA
cctgaagctgctgttacctttgccaagtgttccagccaccggcctaggg

SEQ ID NO: 953 - RNA, 49 nt, synthetic construct
  source 1..49: mol_type = other RNA
cctgaagctgctgttacctttgccaagtgttccagccaccggcctaagg

SEQ ID NO: 954 - RNA, 49 nt, synthetic construct
  source 1..49: mol_type = other RNA
cctgaagctgctgttacctttgccaagtgttccagccaccggccaaggg

SEQ ID NO: 955 - RNA, 49 nt, synthetic construct
  source 1..49: mol_type = other RNA
cctgaagctgctgttacctttgccaagtgttccagccaccggccgaggg

SEQ ID NO: 956 - RNA, 49 nt, synthetic construct
  source 1..49: mol_type = other RNA
cctgaagctgctgttacctttgccaagtgttccagccaccggcccaggg

SEQ ID NO: 957 - RNA, 50 nt, synthetic construct
  source 1..50: mol_type = other RNA
acctgaagctgctgttacctttgccaagtgttccagccaccggcccaggg

SEQ ID NO: 958 - RNA, 50 nt, synthetic construct
  source 1..50: mol_type = other RNA
acctgaagctgctgttacctttgccaagtgttccagccaccggcctaggg

SEQ ID NO: 959 - RNA, 50 nt, synthetic construct
  source 1..50: mol_type = other RNA
acctgaagctgctgttacctttgccaagtgttccagccaccggcctaagg

SEQ ID NO: 960 - RNA, 50 nt, synthetic construct
  source 1..50: mol_type = other RNA
acctgaagctgctgttacctttgccaagtgttccagccaccggccgaggg

SEQ ID NO: 961 - RNA, 50 nt, synthetic construct
  source 1..50: mol_type = other RNA
acctgaagctgctgttacctttgccaagtgttccagccaccggccaaggg

SEQ ID NO: 962 - RNA, 51 nt, synthetic construct
  source 1..51: mol_type = other RNA
aacctgaagctgctgttacctttgccaagtgttccagccaccggcctaagg

SEQ ID NO: 963 - RNA, 51 nt, synthetic construct
  source 1..51: mol_type = other RNA
aacctgaagctgctgttacctttgccaagtgttccagccaccggcccaggg

SEQ ID NO: 964 - RNA, 51 nt, synthetic construct
  source 1..51: mol_type = other RNA
aacctgaagctgctgttacctttgccaagtgttccagccaccggcctaggg

SEQ ID NO: 965 - RNA, 51 nt, synthetic construct
  source 1..51: mol_type = other RNA
aacctgaagctgctgttacctttgccaagtgttccagccaccggccaaggg

SEQ ID NO: 966 - RNA, 51 nt, synthetic construct
  source 1..51: mol_type = other RNA
aacctgaagctgctgttacctttgccaagtgttccagccaccggccgaggg

SEQ ID NO: 967 - RNA, 52 nt, synthetic construct
  source 1..52: mol_type = other RNA
gaacctgaagctgctgttacctttgccaagtgttccagccaccggcccaggg

SEQ ID NO: 968 - RNA, 52 nt, synthetic construct
  source 1..52: mol_type = other RNA
gaacctgaagctgctgttacctttgccaagtgttccagccaccggcctaggg

SEQ ID NO: 969 - RNA, 52 nt, synthetic construct
  source 1..52: mol_type = other RNA
gaacctgaagctgctgttacctttgccaagtgttccagccaccggccaaggg

SEQ ID NO: 970 - RNA, 52 nt, synthetic construct
  source 1..52: mol_type = other RNA
gaacctgaagctgctgttacctttgccaagtgttccagccaccggccgaggg

SEQ ID NO: 971 - RNA, 52 nt, synthetic construct
  source 1..52: mol_type = other RNA
gaacctgaagctgctgttacctttgccaagtgttccagccaccggcctaagg

SEQ ID NO: 972 - RNA, 53 nt, synthetic construct
  source 1..53: mol_type = other RNA
tgaacctgaagctgctgttacctttgccaagtgttccagccaccggcccaggg

SEQ ID NO: 973 - RNA, 53 nt, synthetic construct
  source 1..53: mol_type = other RNA
tgaacctgaagctgctgttacctttgccaagtgttccagccaccggccgaggg

SEQ ID NO: 974 - RNA, 53 nt, synthetic construct
  source 1..53: mol_type = other RNA
tgaacctgaagctgctgttacctttgccaagtgttccagccaccggcctaggg

SEQ ID NO: 975 - RNA, 53 nt, synthetic construct
  source 1..53: mol_type = other RNA
tgaacctgaagctgctgttacctttgccaagtgttccagccaccggccaaggg

SEQ ID NO: 976 - RNA, 53 nt, synthetic construct
  source 1..53: mol_type = other RNA
tgaacctgaagctgctgttacctttgccaagtgttccagccaccggcctaagg

SEQ ID NO: 977 - RNA, 54 nt, synthetic construct
  source 1..54: mol_type = other RNA
ctgaacctgaagctgctgttacctttgccaagtgttccagccaccggccaaggg

SEQ ID NO: 978 - RNA, 54 nt, synthetic construct
  source 1..54: mol_type = other RNA
ctgaacctgaagctgctgttacctttgccaagtgttccagccaccggcctaagg

SEQ ID NO: 979 - RNA, 54 nt, synthetic construct
  source 1..54: mol_type = other RNA
ctgaacctgaagctgctgttacctttgccaagtgttccagccaccggcctaggg

SEQ ID NO: 980 - RNA, 54 nt, synthetic construct
  source 1..54: mol_type = other RNA
ctgaacctgaagctgctgttacctttgccaagtgttccagccaccggccgaggg

SEQ ID NO: 981 - RNA, 54 nt, synthetic construct
  source 1..54: mol_type = other RNA
ctgaacctgaagctgctgttacctttgccaagtgttccagccaccggcccaggg

SEQ ID NO: 982 - RNA, 55 nt, synthetic construct
  source 1..55: mol_type = other RNA
tctgaacctgaagctgctgttacctttgccaagtgttccagccaccggcctaggg

SEQ ID NO: 983 - RNA, 55 nt, synthetic construct
  source 1..55: mol_type = other RNA
tctgaacctgaagctgctgttacctttgccaagtgttccagccaccggccgaggg

SEQ ID NO: 984 - RNA, 55 nt, synthetic construct
  source 1..55: mol_type = other RNA
tctgaacctgaagctgctgttacctttgccaagtgttccagccaccggccaaggg

SEQ ID NO: 985 - RNA, 55 nt, synthetic construct
  source 1..55: mol_type = other RNA
tctgaacctgaagctgctgttacctttgccaagtgttccagccaccggcccaggg

SEQ ID NO: 986 - RNA, 55 nt, synthetic construct
  source 1..55: mol_type = other RNA
tctgaacctgaagctgctgttacctttgccaagtgttccagccaccggcctaagg

SEQ ID NO: 987 - RNA, 56 nt, synthetic construct
  source 1..56: mol_type = other RNA
ttctgaacctgaagctgctgttacctttgccaagtgttccagccaccggcccaggg

SEQ ID NO: 988 - RNA, 56 nt, synthetic construct
  source 1..56: mol_type = other RNA
ttctgaacctgaagctgctgttacctttgccaagtgttccagccaccggcctaagg

SEQ ID NO: 989 - RNA, 56 nt, synthetic construct
  source 1..56: mol_type = other RNA
ttctgaacctgaagctgctgttacctttgccaagtgttccagccaccggccgaggg

SEQ ID NO: 990 - RNA, 56 nt, synthetic construct
  source 1..56: mol_type = other RNA
ttctgaacctgaagctgctgttacctttgccaagtgttccagccaccggccaaggg

SEQ ID NO: 991 - RNA, 56 nt, synthetic construct
  source 1..56: mol_type = other RNA
ttctgaacctgaagctgctgttacctttgccaagtgttccagccaccggcctaggg

SEQ ID NO: 992 - RNA, 57 nt, synthetic construct
  source 1..57: mol_type = other RNA
tttctgaacctgaagctgctgttacctttgccaagtgttccagccaccggccgaggg

SEQ ID NO: 993 - RNA, 57 nt, synthetic construct
  source 1..57: mol_type = other RNA
tttctgaacctgaagctgctgttacctttgccaagtgttccagccaccggcccaggg

SEQ ID NO: 994 - RNA, 57 nt, synthetic construct
  source 1..57: mol_type = other RNA
tttctgaacctgaagctgctgttacctttgccaagtgttccagccaccggccaaggg

SEQ ID NO: 995 - RNA, 57 nt, synthetic construct
  source 1..57: mol_type = other RNA
tttctgaacctgaagctgctgttacctttgccaagtgttccagccaccggcctaagg

SEQ ID NO: 996 - RNA, 57 nt, synthetic construct
  source 1..57: mol_type = other RNA
tttctgaacctgaagctgctgttacctttgccaagtgttccagccaccggcctaggg

SEQ ID NO: 997 - RNA, 58 nt, synthetic construct
  source 1..58: mol_type = other RNA
ttttctgaacctgaagctgctgttacctttgccaagtgttccagccaccggccgaggg

SEQ ID NO: 998 - RNA, 58 nt, synthetic construct
  source 1..58: mol_type = other RNA
ttttctgaacctgaagctgctgttacctttgccaagtgttccagccaccggcctaagg

SEQ ID NO: 999 - RNA, 58 nt, synthetic construct
  source 1..58: mol_type = other RNA
ttttctgaacctgaagctgctgttacctttgccaagtgttccagccaccggccaaggg

SEQ ID NO: 1000 - RNA, 58 nt, synthetic construct
  source 1..58: mol_type = other RNA
ttttctgaacctgaagctgctgttacctttgccaagtgttccagccaccggcccaggg

SEQ ID NO: 1001 - RNA, 58 nt, synthetic construct
  source 1..58: mol_type = other RNA
ttttctgaacctgaagctgctgttacctttgccaagtgttccagccaccggcctaggg

SEQ ID NO: 1002 - RNA, 59 nt, synthetic construct
  source 1..59: mol_type = other RNA
cttttctgaacctgaagctgctgttacctttgccaagtgttccagccaccggccgaggg

SEQ ID NO: 1003 - RNA, 59 nt, synthetic construct
  source 1..59: mol_type = other RNA
cttttctgaacctgaagctgctgttacctttgccaagtgttccagccaccggccaaggg

SEQ ID NO: 1004 - RNA, 59 nt, synthetic construct
  source 1..59: mol_type = other RNA
cttttctgaacctgaagctgctgttacctttgccaagtgttccagccaccggcctaggg

SEQ ID NO: 1005 - RNA, 59 nt, synthetic construct
  source 1..59: mol_type = other RNA
cttttctgaacctgaagctgctgttacctttgccaagtgttccagccaccggcctaagg

SEQ ID NO: 1006 - RNA, 59 nt, synthetic construct
  source 1..59: mol_type = other RNA
cttttctgaacctgaagctgctgttacctttgccaagtgttccagccaccggcccaggg

SEQ ID NO: 1007 - RNA, 60 nt, synthetic construct
  source 1..60: mol_type = other RNA
tcttttctgaacctgaagctgctgttacctttgccaagtgttccagccaccggccaaggg

SEQ ID NO: 1008 - RNA, 60 nt, synthetic construct
  source 1..60: mol_type = other RNA
tcttttctgaacctgaagctgctgttacctttgccaagtgttccagccaccggcctaggg

SEQ ID NO: 1009 - RNA, 60 nt, synthetic construct
  source 1..60: mol_type = other RNA
tcttttctgaacctgaagctgctgttacctttgccaagtgttccagccaccggcccaggg

SEQ ID NO: 1010 - RNA, 60 nt, synthetic construct
  source 1..60: mol_type = other RNA
tcttttctgaacctgaagctgctgttacctttgccaagtgttccagccaccggcctaagg

SEQ ID NO: 1011 - RNA, 60 nt, synthetic construct
  source 1..60: mol_type = other RNA
tcttttctgaacctgaagctgctgttacctttgccaagtgttccagccaccggccgaggg

SEQ ID NO: 1012 - RNA, 61 nt, synthetic construct
  source 1..61: mol_type = other RNA
ctcttttctgaacctgaagctgctgttacctttgccaagtgttccagccaccggccgaggg

SEQ ID NO: 1013 - RNA, 61 nt, synthetic construct
  source 1..61: mol_type = other RNA
ctcttttctgaacctgaagctgctgttacctttgccaagtgttccagccaccggccaaggg

SEQ ID NO: 1014 - RNA, 61 nt, synthetic construct
  source 1..61: mol_type = other RNA
ctcttttctgaacctgaagctgctgttacctttgccaagtgttccagccaccggcccaggg

SEQ ID NO: 1015 - RNA, 61 nt, synthetic construct
  source 1..61: mol_type = other RNA
ctcttttctgaacctgaagctgctgttacctttgccaagtgttccagccaccggcctaagg

SEQ ID NO: 1016 - RNA, 61 nt, synthetic construct
  source 1..61: mol_type = other RNA
ctcttttctgaacctgaagctgctgttacctttgccaagtgttccagccaccggcctaggg

SEQ ID NO: 1017 - RNA, 62 nt, synthetic construct
  source 1..62: mol_type = other RNA
gctcttttctgaacctgaagctgctgttacctttgccaagtgttccagccaccggcctaggg

SEQ ID NO: 1018 - RNA, 62 nt, synthetic construct
  source 1..62: mol_type = other RNA
gctcttttctgaacctgaagctgctgttacctttgccaagtgttccagccaccggcccaggg

SEQ ID NO: 1019 - RNA, 62 nt, synthetic construct
  source 1..62: mol_type = other RNA
gctcttttctgaacctgaagctgctgttacctttgccaagtgttccagccaccggccgaggg

SEQ ID NO: 1020 - RNA, 62 nt, synthetic construct
  source 1..62: mol_type = other RNA
gctcttttctgaacctgaagctgctgttacctttgccaagtgttccagccaccggccaaggg

SEQ ID NO: 1021 - RNA, 62 nt, synthetic construct
  source 1..62: mol_type = other RNA
gctcttttctgaacctgaagctgctgttacctttgccaagtgttccagccaccggcctaagg

SEQ ID NO: 1022 - RNA, 63 nt, synthetic construct
  source 1..63: mol_type = other RNA
agctcttttctgaacctgaagctgctgttacctttgccaagtgttccagccaccggcctaggg

SEQ ID NO: 1023 - RNA, 63 nt, synthetic construct
  source 1..63: mol_type = other RNA
agctcttttctgaacctgaagctgctgttacctttgccaagtgttccagccaccggcccaggg

SEQ ID NO: 1024 - RNA, 63 nt, synthetic construct
  source 1..63: mol_type = other RNA
agctcttttctgaacctgaagctgctgttacctttgccaagtgttccagccaccggcctaagg

SEQ ID NO: 1025 - RNA, 63 nt, synthetic construct
  source 1..63: mol_type = other RNA
agctcttttctgaacctgaagctgctgttacctttgccaagtgttccagccaccggccgaggg

SEQ ID NO: 1026 - RNA, 63 nt, synthetic construct
  source 1..63: mol_type = other RNA
agctcttttctgaacctgaagctgctgttacctttgccaagtgttccagccaccggccaaggg

SEQ ID NO: 1027 - RNA, 64 nt, synthetic construct
  source 1..64: mol_type = other RNA
cagctcttttctgaacctgaagctgctgttacctttgccaagtgttccagccaccggcccaggg

SEQ ID NO: 1028 - RNA, 64 nt, synthetic construct
  source 1..64: mol_type = other RNA
cagctcttttctgaacctgaagctgctgttacctttgccaagtgttccagccaccggcctaggg

SEQ ID NO: 1029 - RNA, 64 nt, synthetic construct
  source 1..64: mol_type = other RNA
cagctcttttctgaacctgaagctgctgttacctttgccaagtgttccagccaccggccgaggg

SEQ ID NO: 1030 - RNA, 64 nt, synthetic construct
  source 1..64: mol_type = other RNA
cagctcttttctgaacctgaagctgctgttacctttgccaagtgttccagccaccggcctaagg

SEQ ID NO: 1031 - RNA, 64 nt, synthetic construct
  source 1..64: mol_type = other RNA
cagctcttttctgaacctgaagctgctgttacctttgccaagtgttccagccaccggccaaggg

SEQ ID NO: 1032 - RNA, 65 nt, synthetic construct
  source 1..65: mol_type = other RNA
gcagctcttttctgaacctgaagctgctgttacctttgccaagtgttccagccaccggcccaggg

SEQ ID NO: 1033 - RNA, 65 nt, synthetic construct
  source 1..65: mol_type = other RNA
gcagctcttttctgaacctgaagctgctgttacctttgccaagtgttccagccaccggcctaggg

SEQ ID NO: 1034 - RNA, 65 nt, synthetic construct
  source 1..65: mol_type = other RNA
gcagctcttttctgaacctgaagctgctgttacctttgccaagtgttccagccaccggccgaggg

SEQ ID NO: 1035 - RNA, 65 nt, synthetic construct
  source 1..65: mol_type = other RNA
gcagctcttttctgaacctgaagctgctgttacctttgccaagtgttccagccaccggcctaagg

SEQ ID NO: 1036 - RNA, 65 nt, synthetic construct
  source 1..65: mol_type = other RNA
gcagctcttttctgaacctgaagctgctgttacctttgccaagtgttccagccaccggccaaggg

SEQ ID NO: 1037 - RNA, 66 nt, synthetic construct
  source 1..66: mol_type = other RNA
agcagctcttttctgaacctgaagctgctgttacctttgccaagtgttccagccaccggccaaggg

SEQ ID NO: 1038 - RNA, 66 nt, synthetic construct
  source 1..66: mol_type = other RNA
agcagctcttttctgaacctgaagctgctgttacctttgccaagtgttccagccaccggcccaggg

SEQ ID NO: 1039 - RNA, 66 nt, synthetic construct
  source 1..66: mol_type = other RNA
agcagctcttttctgaacctgaagctgctgttacctttgccaagtgttccagccaccggccgaggg

SEQ ID NO: 1040 - RNA, 66 nt, synthetic construct
  source 1..66: mol_type = other RNA
agcagctcttttctgaacctgaagctgctgttacctttgccaagtgttccagccaccggcctaggg

SEQ ID NO: 1041 - RNA, 66 nt, synthetic construct
  source 1..66: mol_type = other RNA
agcagctcttttctgaacctgaagctgctgttacctttgccaagtgttccagccaccggcctaagg

SEQ ID NO: 1042 - RNA, 67 nt, synthetic construct
  source 1..67: mol_type = other RNA
gagcagctcttttctgaacctgaagctgctgttacctttgccaagtgttccagccaccggccgaggg

SEQ ID NO: 1043 - RNA, 67 nt, synthetic construct
  source 1..67: mol_type = other RNA
gagcagctcttttctgaacctgaagctgctgttacctttgccaagtgttccagccaccggcccaggg

SEQ ID NO: 1044 - RNA, 67 nt, synthetic construct
  source 1..67: mol_type = other RNA
gagcagctcttttctgaacctgaagctgctgttacctttgccaagtgttccagccaccggcctaggg

SEQ ID NO: 1045 - RNA, 67 nt, synthetic construct
  source 1..67: mol_type = other RNA
gagcagctcttttctgaacctgaagctgctgttacctttgccaagtgttccagccaccggccaaggg

SEQ ID NO: 1046 - RNA, 67 nt, synthetic construct
  source 1..67: mol_type = other RNA
gagcagctcttttctgaacctgaagctgctgttacctttgccaagtgttccagccaccggcctaagg

SEQ ID NO: 1047 - RNA, 68 nt, synthetic construct
  source 1..68: mol_type = other RNA
ggagcagctcttttctgaacctgaagctgctgttacctttgccaagtgttccagccaccggccaaggg

SEQ ID NO: 1048 - RNA, 68 nt, synthetic construct
  source 1..68: mol_type = other RNA
ggagcagctcttttctgaacctgaagctgctgttacctttgccaagtgttccagccaccggcccaggg

SEQ ID NO: 1049 - RNA, 68 nt, synthetic construct
  source 1..68: mol_type = other RNA
ggagcagctcttttctgaacctgaagctgctgttacctttgccaagtgttccagccaccggccgaggg

SEQ ID NO: 1050 - RNA, 68 nt, synthetic construct
  source 1..68: mol_type = other RNA
ggagcagctcttttctgaacctgaagctgctgttacctttgccaagtgttccagccaccggcctaggg

SEQ ID NO: 1051 - RNA, 68 nt, synthetic construct
  source 1..68: mol_type = other RNA
ggagcagctcttttctgaacctgaagctgctgttacctttgccaagtgttccagccaccggcctaagg

SEQ ID NO: 1052 - RNA, 69 nt, synthetic construct
  source 1..69: mol_type = other RNA
aggagcagctcttttctgaacctgaagctgctgttacctttgccaagtgttccagccaccggcccaggg

SEQ ID NO: 1053 - RNA, 69 nt, synthetic construct
  source 1..69: mol_type = other RNA
aggagcagctcttttctgaacctgaagctgctgttacctttgccaagtgttccagccaccggccgaggg

SEQ ID NO: 1054 - RNA, 69 nt, synthetic construct
  source 1..69: mol_type = other RNA
aggagcagctcttttctgaacctgaagctgctgttacctttgccaagtgttccagccaccggcctaggg

SEQ ID NO: 1055 - RNA, 69 nt, synthetic construct
  source 1..69: mol_type = other RNA
aggagcagctcttttctgaacctgaagctgctgttacctttgccaagtgttccagccaccggccaaggg

SEQ ID NO: 1056 - RNA, 69 nt, synthetic construct
  source 1..69: mol_type = other RNA
aggagcagctcttttctgaacctgaagctgctgttacctttgccaagtgttccagccaccggcctaagg

SEQ ID NO: 1057 - RNA, 70 nt, synthetic construct
  source 1..70: mol_type = other RNA
aaggagcagctcttttctgaacctgaagctgctgttacctttgccaagtgttccagccaccggcctaggg

SEQ ID NO: 1058 - RNA, 70 nt, synthetic construct
  source 1..70: mol_type = other RNA
aaggagcagctcttttctgaacctgaagctgctgttacctttgccaagtgttccagccaccggcccaggg

SEQ ID NO: 1059 - RNA, 70 nt, synthetic construct
  source 1..70: mol_type = other RNA
aaggagcagctcttttctgaacctgaagctgctgttacctttgccaagtgttccagccaccggcctaagg

SEQ ID NO: 1060 - RNA, 70 nt, synthetic construct
  source 1..70: mol_type = other RNA
aaggagcagctcttttctgaacctgaagctgctgttacctttgccaagtgttccagccaccggccaaggg

SEQ ID NO: 1061 - RNA, 70 nt, synthetic construct
  source 1..70: mol_type = other RNA
aaggagcagctcttttctgaacctgaagctgctgttacctttgccaagtgttccagccaccggccgaggg

SEQ ID NO: 1062 - RNA, 71 nt, synthetic construct
  source 1..71: mol_type = other RNA
gaaggagcagctcttttctgaacctgaagctgctgttacctttgccaagtgttccagccaccggccaaggg

SEQ ID NO: 1063 - RNA, 71 nt, synthetic construct
  source 1..71: mol_type = other RNA
gaaggagcagctcttttctgaacctgaagctgctgttacctttgccaagtgttccagccaccggcccaggg

SEQ ID NO: 1064 - RNA, 71 nt, synthetic construct
  source 1..71: mol_type = other RNA
gaaggagcagctcttttctgaacctgaagctgctgttacctttgccaagtgttccagccaccggcctaagg

SEQ ID NO: 1065 - RNA, 71 nt, synthetic construct
  source 1..71: mol_type = other RNA
gaaggagcagctcttttctgaacctgaagctgctgttacctttgccaagtgttccagccaccggccgaggg

SEQ ID NO: 1066 - RNA, 71 nt, synthetic construct
  source 1..71: mol_type = other RNA
gaaggagcagctcttttctgaacctgaagctgctgttacctttgccaagtgttccagccaccggcctaggg

SEQ ID NO: 1067 - RNA, 72 nt, synthetic construct
  source 1..72: mol_type = other RNA
tgaaggagcagctcttttctgaacctgaagctgctgttacctttgccaagtgttccagccaccggcccaggg

SEQ ID NO: 1068 - RNA, 72 nt, synthetic construct
  source 1..72: mol_type = other RNA
tgaaggagcagctcttttctgaacctgaagctgctgttacctttgccaagtgttccagccaccggcctaggg

SEQ ID NO: 1069 - RNA, 72 nt, synthetic construct
  source 1..72: mol_type = other RNA
tgaaggagcagctcttttctgaacctgaagctgctgttacctttgccaagtgttccagccaccggccaaggg

SEQ ID NO: 1070 - RNA, 72 nt, synthetic construct
  source 1..72: mol_type = other RNA
tgaaggagcagctcttttctgaacctgaagctgctgttacctttgccaagtgttccagccaccggcctaagg

SEQ ID NO: 1071 - RNA, 72 nt, synthetic construct
  source 1..72: mol_type = other RNA
tgaaggagcagctcttttctgaacctgaagctgctgttacctttgccaagtgttccagccaccggccgaggg

SEQ ID NO: 1072 - RNA, 73 nt, synthetic construct
  source 1..73: mol_type = other RNA
ctgaaggagcagctcttttctgaacctgaagctgctgttacctttgccaagtgttccagccaccggcctaggg

SEQ ID NO: 1073 - RNA, 73 nt, synthetic construct
  source 1..73: mol_type = other RNA
ctgaaggagcagctcttttctgaacctgaagctgctgttacctttgccaagtgttccagccaccggcctaagg

SEQ ID NO: 1074 - RNA, 73 nt, synthetic construct
  source 1..73: mol_type = other RNA
ctgaaggagcagctcttttctgaacctgaagctgctgttacctttgccaagtgttccagccaccggccaaggg

SEQ ID NO: 1075 - RNA, 73 nt, synthetic construct
  source 1..73: mol_type = other RNA
ctgaaggagcagctcttttctgaacctgaagctgctgttacctttgccaagtgttccagccaccggccgaggg

SEQ ID NO: 1076 - RNA, 73 nt, synthetic construct
  source 1..73: mol_type = other RNA
ctgaaggagcagctcttttctgaacctgaagctgctgttacctttgccaagtgttccagccaccggcccaggg

SEQ ID NO: 1077 - RNA, 74 nt, synthetic construct
  source 1..74: mol_type = other RNA
actgaaggagcagctcttttctgaacctgaagctgctgttacctttgccaagtgttccagccaccggccaaggg

SEQ ID NO: 1078 - RNA, 74 nt, synthetic construct
  source 1..74: mol_type = other RNA
actgaaggagcagctcttttctgaacctgaagctgctgttacctttgccaagtgttccagccaccggcctaggg

SEQ ID NO: 1079 - RNA, 74 nt, synthetic construct
  source 1..74: mol_type = other RNA
actgaaggagcagctcttttctgaacctgaagctgctgttacctttgccaagtgttccagccaccggccgaggg

SEQ ID NO: 1080 - RNA, 74 nt, synthetic construct
  source 1..74: mol_type = other RNA
actgaaggagcagctcttttctgaacctgaagctgctgttacctttgccaagtgttccagccaccggcccaggg

SEQ ID NO: 1081 - RNA, 74 nt, synthetic construct
  source 1..74: mol_type = other RNA
actgaaggagcagctcttttctgaacctgaagctgctgttacctttgccaagtgttccagccaccggcctaagg

SEQ ID NO: 1082 - RNA, 75 nt, synthetic construct
  source 1..75: mol_type = other RNA
tactgaaggagcagctcttttctgaacctgaagctgctgttacctttgccaagtgttccagccaccggccaaggg

SEQ ID NO: 1083 - RNA, 75 nt, synthetic construct
  source 1..75: mol_type = other RNA
tactgaaggagcagctcttttctgaacctgaagctgctgttacctttgccaagtgttccagccaccggcctaagg

SEQ ID NO: 1084 - RNA, 75 nt, synthetic construct
  source 1..75: mol_type = other RNA
tactgaaggagcagctcttttctgaacctgaagctgctgttacctttgccaagtgttccagccaccggccgaggg

SEQ ID NO: 1085 - RNA, 75 nt, synthetic construct
  source 1..75: mol_type = other RNA
tactgaaggagcagctcttttctgaacctgaagctgctgttacctttgccaagtgttccagccaccggcccaggg

SEQ ID NO: 1086 - RNA, 75 nt, synthetic construct
  source 1..75: mol_type = other RNA
tactgaaggagcagctcttttctgaacctgaagctgctgttacctttgccaagtgttccagccaccggcctaggg

SEQ ID NO: 1087 - RNA, 76 nt, synthetic construct
  source 1..76: mol_type = other RNA
ttactgaaggagcagctcttttctgaacctgaagctgctgttacctttgccaagtgttccagccaccggccgaggg

SEQ ID NO: 1088 - RNA, 76 nt, synthetic construct
  source 1..76: mol_type = other RNA
ttactgaaggagcagctcttttctgaacctgaagctgctgttacctttgccaagtgttccagccaccggcccaggg

SEQ ID NO: 1089 - RNA, 76 nt, synthetic construct
  source 1..76: mol_type = other RNA
ttactgaaggagcagctcttttctgaacctgaagctgctgttacctttgccaagtgttccagccaccggcctaagg

SEQ ID NO: 1090 - RNA, 76 nt, synthetic construct
  source 1..76: mol_type = other RNA
ttactgaaggagcagctcttttctgaacctgaagctgctgttacctttgccaagtgttccagccaccggcctaggg

SEQ ID NO: 1091 - RNA, 76 nt, synthetic construct
  source 1..76: mol_type = other RNA
ttactgaaggagcagctcttttctgaacctgaagctgctgttacctttgccaagtgttccagccaccggccaaggg

SEQ ID NO: 1092 - RNA, 77 nt, synthetic construct
  source 1..77: mol_type = other RNA
tttactgaaggagcagctcttttctgaacctgaagctgctgttacctttgccaagtgttccagccaccggcctaagg

SEQ ID NO: 1093 - RNA, 77 nt, synthetic construct
  source 1..77: mol_type = other RNA
tttactgaaggagcagctcttttctgaacctgaagctgctgttacctttgccaagtgttccagccaccggccaaggg

SEQ ID NO: 1094 - RNA, 77 nt, synthetic construct
  source 1..77: mol_type = other RNA
tttactgaaggagcagctcttttctgaacctgaagctgctgttacctttgccaagtgttccagccaccggccgaggg

SEQ ID NO: 1095 - RNA, 77 nt, synthetic construct
  source 1..77: mol_type = other RNA
tttactgaaggagcagctcttttctgaacctgaagctgctgttacctttgccaagtgttccagccaccggcctaggg

SEQ ID NO: 1096 - RNA, 77 nt, synthetic construct
  source 1..77: mol_type = other RNA
tttactgaaggagcagctcttttctgaacctgaagctgctgttacctttgccaagtgttccagccaccggcccaggg

SEQ ID NO: 1097 - RNA, 78 nt, synthetic construct
  source 1..78: mol_type = other RNA
gtttactgaaggagcagctcttttctgaacctgaagctgctgttacctttgccaagtgttccagccaccggccaaggg

SEQ ID NO: 1098 - RNA, 78 nt, synthetic construct
  source 1..78: mol_type = other RNA
gtttactgaaggagcagctcttttctgaacctgaagctgctgttacctttgccaagtgttccagccaccggcctaagg

SEQ ID NO: 1099 - RNA, 78 nt, synthetic construct
  source 1..78: mol_type = other RNA
gtttactgaaggagcagctcttttctgaacctgaagctgctgttacctttgccaagtgttccagccaccggcccaggg

SEQ ID NO: 1100 - RNA, 78 nt, synthetic construct
  source 1..78: mol_type = other RNA
gtttactgaaggagcagctcttttctgaacctgaagctgctgttacctttgccaagtgttccagccaccggcctaggg

SEQ ID NO: 1101 - RNA, 78 nt, synthetic construct
  source 1..78: mol_type = other RNA
gtttactgaaggagcagctcttttctgaacctgaagctgctgttacctttgccaagtgttccagccaccggccgaggg

SEQ ID NO: 1102 - RNA, 79 nt, synthetic construct
  source 1..79: mol_type = other RNA
tgtttactgaaggagcagctcttttctgaacctgaagctgctgttacctttgccaagtgttccagccaccggcctaagg

SEQ ID NO: 1103 - RNA, 79 nt, synthetic construct
  source 1..79: mol_type = other RNA
tgtttactgaaggagcagctcttttctgaacctgaagctgctgttacctttgccaagtgttccagccaccggccaaggg

SEQ ID NO: 1104 - RNA, 79 nt, synthetic construct
  source 1..79: mol_type = other RNA
tgtttactgaaggagcagctcttttctgaacctgaagctgctgttacctttgccaagtgttccagccaccggcccaggg

SEQ ID NO: 1105 - RNA, 79 nt, synthetic construct
  source 1..79: mol_type = other RNA
tgtttactgaaggagcagctcttttctgaacctgaagctgctgttacctttgccaagtgttccagccaccggcctaggg

SEQ ID NO: 1106 - RNA, 79 nt, synthetic construct
  source 1..79: mol_type = other RNA
tgtttactgaaggagcagctcttttctgaacctgaagctgctgttacctttgccaagtgttccagccaccggccgaggg

SEQ ID NO: 1107 - RNA, 80 nt, synthetic construct
  source 1..80: mol_type = other RNA
ttgtttactgaaggagcagctcttttctgaacctgaagctgctgttacctttgccaagtgttccagccaccggcccaggg

SEQ ID NO: 1108 - RNA, 80 nt, synthetic construct
  source 1..80: mol_type = other RNA
ttgtttactgaaggagcagctcttttctgaacctgaagctgctgttacctttgccaagtgttccagccaccggccaaggg

SEQ ID NO: 1109 - RNA, 80 nt, synthetic construct
  source 1..80: mol_type = other RNA
ttgtttactgaaggagcagctcttttctgaacctgaagctgctgttacctttgccaagtgttccagccaccggcctaggg

SEQ ID NO: 1110 - RNA, 80 nt, synthetic construct
  source 1..80: mol_type = other RNA
ttgtttactgaaggagcagctcttttctgaacctgaagctgctgttacctttgccaagtgttccagccaccggcctaagg

SEQ ID NO: 1111 - RNA, 80 nt, synthetic construct
  source 1..80: mol_type = other RNA
ttgtttactgaaggagcagctcttttctgaacctgaagctgctgttacctttgccaagtgttccagccaccggccgaggg

SEQ ID NO: 1112 - RNA, 81 nt, synthetic construct
  source 1..81: mol_type = other RNA
tttgtttactgaaggagcagctcttttctgaacctgaagctgctgttacctttgccaagtgttccagccaccggcctaggg

SEQ ID NO: 1113 - RNA, 81 nt, synthetic construct
  source 1..81: mol_type = other RNA
tttgtttactgaaggagcagctcttttctgaacctgaagctgctgttacctttgccaagtgttccagccaccggcccaggg

SEQ ID NO: 1114 - RNA, 81 nt, synthetic construct
  source 1..81: mol_type = other RNA
tttgtttactgaaggagcagctcttttctgaacctgaagctgctgttacctttgccaagtgttccagccaccggccaaggg

SEQ ID NO: 1115 - RNA, 81 nt, synthetic construct
  source 1..81: mol_type = other RNA
tttgtttactgaaggagcagctcttttctgaacctgaagctgctgttacctttgccaagtgttccagccaccggccgaggg

SEQ ID NO: 1116 - RNA, 81 nt, synthetic construct
  source 1..81: mol_type = other RNA
tttgtttactgaaggagcagctcttttctgaacctgaagctgctgttacctttgccaagtgttccagccaccggcctaagg

SEQ ID NO: 1117 - RNA, 82 nt, synthetic construct
  source 1..82: mol_type = other RNA
atttgtttactgaaggagcagctcttttctgaacctgaagctgctgttacctttgccaagtgttccagccaccggcccaggg

SEQ ID NO: 1118 - RNA, 82 nt, synthetic construct
  source 1..82: mol_type = other RNA
atttgtttactgaaggagcagctcttttctgaacctgaagctgctgttacctttgccaagtgttccagccaccggcctaggg

SEQ ID NO: 1119 - RNA, 82 nt, synthetic construct
  source 1..82: mol_type = other RNA
atttgtttactgaaggagcagctcttttctgaacctgaagctgctgttacctttgccaagtgttccagccaccggccaaggg

SEQ ID NO: 1120 - RNA, 82 nt, synthetic construct
  source 1..82: mol_type = other RNA
atttgtttactgaaggagcagctcttttctgaacctgaagctgctgttacctttgccaagtgttccagccaccggcctaagg

SEQ ID NO: 1121 - RNA, 82 nt, synthetic construct
  source 1..82: mol_type = other RNA
atttgtttactgaaggagcagctcttttctgaacctgaagctgctgttacctttgccaagtgttccagccaccggccgaggg

SEQ ID NO: 1122 - RNA, 83 nt, synthetic construct
  source 1..83: mol_type = other RNA
gatttgtttactgaaggagcagctcttttctgaacctgaagctgctgttacctttgccaagtgttccagccaccggccaaggg

SEQ ID NO: 1123 - RNA, 83 nt, synthetic construct
  source 1..83: mol_type = other RNA
gatttgtttactgaaggagcagctcttttctgaacctgaagctgctgttacctttgccaagtgttccagccaccggcctaagg

SEQ ID NO: 1124 - RNA, 83 nt, synthetic construct
  source 1..83: mol_type = other RNA
gatttgtttactgaaggagcagctcttttctgaacctgaagctgctgttacctttgccaagtgttccagccaccggcccaggg

SEQ ID NO: 1125 - RNA, 83 nt, synthetic construct
  source 1..83: mol_type = other RNA
gatttgtttactgaaggagcagctcttttctgaacctgaagctgctgttacctttgccaagtgttccagccaccggccgaggg

SEQ ID NO: 1126 - RNA, 83 nt, synthetic construct
  source 1..83: mol_type = other RNA
gatttgtttactgaaggagcagctcttttctgaacctgaagctgctgttacctttgccaagtgttccagccaccggcctaggg

SEQ ID NO: 1127 - RNA, 84 nt, synthetic construct
  source 1..84: mol_type = other RNA
agatttgtttactgaaggagcagctcttttctgaacctgaagctgctgttacctttgccaagtgttccagccaccggccaaggg

SEQ ID NO: 1128 - RNA, 84 nt, synthetic construct
  source 1..84: mol_type = other RNA
agatttgtttactgaaggagcagctcttttctgaacctgaagctgctgttacctttgccaagtgttccagccaccggcccaggg

SEQ ID NO: 1129 - RNA, 84 nt, synthetic construct
  source 1..84: mol_type = other RNA
agatttgtttactgaaggagcagctcttttctgaacctgaagctgctgttacctttgccaagtgttccagccaccggcctaggg

SEQ ID NO: 1130 - RNA, 84 nt, synthetic construct
  source 1..84: mol_type = other RNA
agatttgtttactgaaggagcagctcttttctgaacctgaagctgctgttacctttgccaagtgttccagccaccggccgaggg

SEQ ID NO: 1131 - RNA, 84 nt, synthetic construct
  source 1..84: mol_type = other RNA
agatttgtttactgaaggagcagctcttttctgaacctgaagctgctgttacctttgccaagtgttccagccaccggcctaagg

SEQ ID NO: 1132 - RNA, 85 nt, synthetic construct
  source 1..85: mol_type = other RNA
gagatttgtttactgaaggagcagctcttttctgaacctgaagctgctgttacctttgccaagtgttccagccaccggccaaggg

SEQ ID NO: 1133 - RNA, 85 nt, synthetic construct
  source 1..85: mol_type = other RNA
gagatttgtttactgaaggagcagctcttttctgaacctgaagctgctgttacctttgccaagtgttccagccaccggcccaggg

SEQ ID NO: 1134 - RNA, 85 nt, synthetic construct
  source 1..85: mol_type = other RNA
gagatttgtttactgaaggagcagctcttttctgaacctgaagctgctgttacctttgccaagtgttccagccaccggccgaggg

SEQ ID NO: 1135 - RNA, 85 nt, synthetic construct
  source 1..85: mol_type = other RNA
gagatttgtttactgaaggagcagctcttttctgaacctgaagctgctgttacctttgccaagtgttccagccaccggcctaggg

SEQ ID NO: 1136 - RNA, 85 nt, synthetic construct
  source 1..85: mol_type = other RNA
gagatttgtttactgaaggagcagctcttttctgaacctgaagctgctgttacctttgccaagtgttccagccaccggcctaagg

SEQ ID NO: 1137 - RNA, 86 nt, synthetic construct
  source 1..86: mol_type = other RNA
tgagatttgtttactgaaggagcagctcttttctgaacctgaagctgctgttacctttgccaagtgttccagccaccggcctaggg

SEQ ID NO: 1138 - RNA, 86 nt, synthetic construct
  source 1..86: mol_type = other RNA
tgagatttgtttactgaaggagcagctcttttctgaacctgaagctgctgttacctttgccaagtgttccagccaccggccaaggg

SEQ ID NO: 1139 - RNA, 86 nt, synthetic construct
  source 1..86: mol_type = other RNA
tgagatttgtttactgaaggagcagctcttttctgaacctgaagctgctgttacctttgccaagtgttccagccaccggcctaagg

SEQ ID NO: 1140 - RNA, 86 nt, synthetic construct
  source 1..86: mol_type = other RNA
tgagatttgtttactgaaggagcagctcttttctgaacctgaagctgctgttacctttgccaagtgttccagccaccggcccaggg

SEQ ID NO: 1141 - RNA, 86 nt, synthetic construct
  source 1..86: mol_type = other RNA
tgagatttgtttactgaaggagcagctcttttctgaacctgaagctgctgttacctttgccaagtgttccagccaccggccgaggg

SEQ ID NO: 1142 - RNA, 87 nt, synthetic construct
  source 1..87: mol_type = other RNA
gtgagatttgtttactgaaggagcagctcttttctgaacctgaagctgctgttacctttgccaagtgttccagccaccggcctaggg

SEQ ID NO: 1143 - RNA, 87 nt, synthetic construct
  source 1..87: mol_type = other RNA
gtgagatttgtttactgaaggagcagctcttttctgaacctgaagctgctgttacctttgccaagtgttccagccaccggcctaagg

SEQ ID NO: 1144 - RNA, 87 nt, synthetic construct
  source 1..87: mol_type = other RNA
gtgagatttgtttactgaaggagcagctcttttctgaacctgaagctgctgttacctttgccaagtgttccagccaccggccgaggg

SEQ ID NO: 1145 - RNA, 87 nt, synthetic construct
  source 1..87: mol_type = other RNA
gtgagatttgtttactgaaggagcagctcttttctgaacctgaagctgctgttacctttgccaagtgttccagccaccggccaaggg

SEQ ID NO: 1146 - RNA, 87 nt, synthetic construct
  source 1..87: mol_type = other RNA
gtgagatttgtttactgaaggagcagctcttttctgaacctgaagctgctgttacctttgccaagtgttccagccaccggcccaggg

SEQ ID NO: 1147 - RNA, 88 nt, synthetic construct
  source 1..88: mol_type = other RNA
agtgagatttgtttactgaaggagcagctcttttctgaacctgaagctgctgttacctttgccaagtgttccagccaccggcctaagg

SEQ ID NO: 1148 - RNA, 88 nt, synthetic construct
  source 1..88: mol_type = other RNA
agtgagatttgtttactgaaggagcagctcttttctgaacctgaagctgctgttacctttgccaagtgttccagccaccggccaaggg

SEQ ID NO: 1149 - RNA, 88 nt, synthetic construct
  source 1..88: mol_type = other RNA
agtgagatttgtttactgaaggagcagctcttttctgaacctgaagctgctgttacctttgccaagtgttccagccaccggcctaggg

SEQ ID NO: 1150 - RNA, 88 nt, synthetic construct
  source 1..88: mol_type = other RNA
agtgagatttgtttactgaaggagcagctcttttctgaacctgaagctgctgttacctttgccaagtgttccagccaccggccgaggg

SEQ ID NO: 1151 - RNA, 88 nt, synthetic construct
  source 1..88: mol_type = other RNA
agtgagatttgtttactgaaggagcagctcttttctgaacctgaagctgctgttacctttgccaagtgttccagccaccggcccaggg

SEQ ID NO: 1152 - RNA, 89 nt, synthetic construct
  source 1..89: mol_type = other RNA
aagtgagatttgtttactgaaggagcagctcttttctgaacctgaagctgctgttacctttgccaagtgttccagccaccggcctaggg

SEQ ID NO: 1153 - RNA, 89 nt, synthetic construct
  source 1..89: mol_type = other RNA
aagtgagatttgtttactgaaggagcagctcttttctgaacctgaagctgctgttacctttgccaagtgttccagccaccggcctaagg

SEQ ID NO: 1154 - RNA, 89 nt, synthetic construct
  source 1..89: mol_type = other RNA
aagtgagatttgtttactgaaggagcagctcttttctgaacctgaagctgctgttacctttgccaagtgttccagccaccggccaaggg

SEQ ID NO: 1155 - RNA, 89 nt, synthetic construct
  source 1..89: mol_type = other RNA
aagtgagatttgtttactgaaggagcagctcttttctgaacctgaagctgctgttacctttgccaagtgttccagccaccggcccaggg

SEQ ID NO: 1156 - RNA, 89 nt, synthetic construct
  source 1..89: mol_type = other RNA
aagtgagatttgtttactgaaggagcagctcttttctgaacctgaagctgctgttacctttgccaagtgttccagccaccggccgaggg

SEQ ID NO: 1157 - RNA, 90 nt, synthetic construct
  source 1..90: mol_type = other RNA
gaagtgagatttgtttactgaaggagcagctcttttctgaacctgaagctgctgttacctttgccaagtgttccagccaccggccaaggg

SEQ ID NO: 1158 - RNA, 90 nt, synthetic construct
  source 1..90: mol_type = other RNA
gaagtgagatttgtttactgaaggagcagctcttttctgaacctgaagctgctgttacctttgccaagtgttccagccaccggcctaggg

SEQ ID NO: 1159 - RNA, 90 nt, synthetic construct
  source 1..90: mol_type = other RNA
gaagtgagatttgtttactgaaggagcagctcttttctgaacctgaagctgctgttacctttgccaagtgttccagccaccggcctaagg

SEQ ID NO: 1160 - RNA, 90 nt, synthetic construct
  source 1..90: mol_type = other RNA
gaagtgagatttgtttactgaaggagcagctcttttctgaacctgaagctgctgttacctttgccaagtgttccagccaccggccgaggg

SEQ ID NO: 1161 - RNA, 90 nt, synthetic construct
  source 1..90: mol_type = other RNA
gaagtgagatttgtttactgaaggagcagctcttttctgaacctgaagctgctgttacctttgccaagtgttccagccaccggcccaggg

SEQ ID NO: 1162 - RNA, 91 nt, synthetic construct
  source 1..91: mol_type = other RNA
ggaagtgagatttgtttactgaaggagcagctcttttctgaacctgaagctgctgttacctttgccaagtgttccagccaccggcccaggg

SEQ ID NO: 1163 - RNA, 91 nt, synthetic construct
  source 1..91: mol_type = other RNA
ggaagtgagatttgtttactgaaggagcagctcttttctgaacctgaagctgctgttacctttgccaagtgttccagccaccggcctaggg

SEQ ID NO: 1164 - RNA, 91 nt, synthetic construct
  source 1..91: mol_type = other RNA
ggaagtgagatttgtttactgaaggagcagctcttttctgaacctgaagctgctgttacctttgccaagtgttccagccaccggcctaagg

SEQ ID NO: 1165 - RNA, 91 nt, synthetic construct
  source 1..91: mol_type = other RNA
ggaagtgagatttgtttactgaaggagcagctcttttctgaacctgaagctgctgttacctttgccaagtgttccagccaccggccgaggg

SEQ ID NO: 1166 - RNA, 91 nt, synthetic construct
  source 1..91: mol_type = other RNA
ggaagtgagatttgtttactgaaggagcagctcttttctgaacctgaagctgctgttacctttgccaagtgttccagccaccggccaaggg

SEQ ID NO: 1167 - RNA, 92 nt, synthetic construct
  source 1..92: mol_type = other RNA
aggaagtgagatttgtttactgaaggagcagctcttttctgaacctgaagctgctgttacctttgccaagtgttccagccaccggcccaggg

SEQ ID NO: 1168 - RNA, 92 nt, synthetic construct
  source 1..92: mol_type = other RNA
aggaagtgagatttgtttactgaaggagcagctcttttctgaacctgaagctgctgttacctttgccaagtgttccagccaccggcctaggg

SEQ ID NO: 1169 - RNA, 92 nt, synthetic construct
  source 1..92: mol_type = other RNA
aggaagtgagatttgtttactgaaggagcagctcttttctgaacctgaagctgctgttacctttgccaagtgttccagccaccggccgaggg

SEQ ID NO: 1170 - RNA, 92 nt, synthetic construct
  source 1..92: mol_type = other RNA
aggaagtgagatttgtttactgaaggagcagctcttttctgaacctgaagctgctgttacctttgccaagtgttccagccaccggcctaagg

SEQ ID NO: 1171 - RNA, 92 nt, synthetic construct
  source 1..92: mol_type = other RNA
aggaagtgagatttgtttactgaaggagcagctcttttctgaacctgaagctgctgttacctttgccaagtgttccagccaccggccaaggg

SEQ ID NO: 1172 - RNA, 93 nt, synthetic construct
  source 1..93: mol_type = other RNA
gaggaagtgagatttgtttactgaaggagcagctcttttctgaacctgaagctgctgttacctttgccaagtgttccagccaccggccaaggg

SEQ ID NO: 1173 - RNA, 93 nt, synthetic construct
  source 1..93: mol_type = other RNA
gaggaagtgagatttgtttactgaaggagcagctcttttctgaacctgaagctgctgttacctttgccaagtgttccagccaccggccgaggg

SEQ ID NO: 1174 - RNA, 93 nt, synthetic construct
  source 1..93: mol_type = other RNA
gaggaagtgagatttgtttactgaaggagcagctcttttctgaacctgaagctgctgttacctttgccaagtgttccagccaccggcctaagg

SEQ ID NO: 1175 - RNA, 93 nt, synthetic construct
  source 1..93: mol_type = other RNA
gaggaagtgagatttgtttactgaaggagcagctcttttctgaacctgaagctgctgttacctttgccaagtgttccagccaccggcccaggg

SEQ ID NO: 1176 - RNA, 93 nt, synthetic construct
  source 1..93: mol_type = other RNA
gaggaagtgagatttgtttactgaaggagcagctcttttctgaacctgaagctgctgttacctttgccaagtgttccagccaccggcctaggg

SEQ ID NO: 1177 - RNA, 94 nt, synthetic construct
  source 1..94: mol_type = other RNA
agaggaagtgagatttgtttactgaaggagcagctcttttctgaacctgaagctgctgttacctttgccaagtgttccagccaccggcctaggg

SEQ ID NO: 1178 - RNA, 94 nt, synthetic construct
  source 1..94: mol_type = other RNA
agaggaagtgagatttgtttactgaaggagcagctcttttctgaacctgaagctgctgttacctttgccaagtgttccagccaccggcctaagg

SEQ ID NO: 1179 - RNA, 94 nt, synthetic construct
  source 1..94: mol_type = other RNA
agaggaagtgagatttgtttactgaaggagcagctcttttctgaacctgaagctgctgttacctttgccaagtgttccagccaccggccaaggg

SEQ ID NO: 1180 - RNA, 94 nt, synthetic construct
  source 1..94: mol_type = other RNA
agaggaagtgagatttgtttactgaaggagcagctcttttctgaacctgaagctgctgttacctttgccaagtgttccagccaccggccgaggg

SEQ ID NO: 1181 - RNA, 94 nt, synthetic construct
  source 1..94: mol_type = other RNA
agaggaagtgagatttgtttactgaaggagcagctcttttctgaacctgaagctgctgttacctttgccaagtgttccagccaccggcccaggg

SEQ ID NO: 1182 - RNA, 95 nt, synthetic construct
  source 1..95: mol_type = other RNA
cagaggaagtgagatttgtttactgaaggagcagctcttttctgaacctgaagctgctgttacctttgccaagtgttccagccaccggcctaagg

SEQ ID NO: 1183 - RNA, 95 nt, synthetic construct
  source 1..95: mol_type = other RNA
cagaggaagtgagatttgtttactgaaggagcagctcttttctgaacctgaagctgctgttacctttgccaagtgttccagccaccggccgaggg

SEQ ID NO: 1184 - RNA, 95 nt, synthetic construct
  source 1..95: mol_type = other RNA
cagaggaagtgagatttgtttactgaaggagcagctcttttctgaacctgaagctgctgttacctttgccaagtgttccagccaccggccaaggg

SEQ ID NO: 1185 - RNA, 95 nt, synthetic construct
  source 1..95: mol_type = other RNA
cagaggaagtgagatttgtttactgaaggagcagctcttttctgaacctgaagctgctgttacctttgccaagtgttccagccaccggcctaggg

SEQ ID NO: 1186 - RNA, 95 nt, synthetic construct
  source 1..95: mol_type = other RNA
cagaggaagtgagatttgtttactgaaggagcagctcttttctgaacctgaagctgctgttacctttgccaagtgttccagccaccggcccaggg

SEQ ID NO: 1187 - RNA, 96 nt, synthetic construct
  source 1..96: mol_type = other RNA
tcagaggaagtgagatttgtttactgaaggagcagctcttttctgaacctgaagctgctgttacctttgccaagtgttccagccaccggccgaggg

SEQ ID NO: 1188 - RNA, 96 nt, synthetic construct
  source 1..96: mol_type = other RNA
tcagaggaagtgagatttgtttactgaaggagcagctcttttctgaacctgaagctgctgttacctttgccaagtgttccagccaccggcctaagg

SEQ ID NO: 1189 - RNA, 96 nt, synthetic construct
  source 1..96: mol_type = other RNA
tcagaggaagtgagatttgtttactgaaggagcagctcttttctgaacctgaagctgctgttacctttgccaagtgttccagccaccggcccaggg

SEQ ID NO: 1190 - RNA, 96 nt, synthetic construct
  source 1..96: mol_type = other RNA
tcagaggaagtgagatttgtttactgaaggagcagctcttttctgaacctgaagctgctgttacctttgccaagtgttccagccaccggcctaggg

SEQ ID NO: 1191 - RNA, 96 nt, synthetic construct
  source 1..96: mol_type = other RNA
tcagaggaagtgagatttgtttactgaaggagcagctcttttctgaacctgaagctgctgttacctttgccaagtgttccagccaccggccaaggg

SEQ ID NO: 1192 - RNA, 97 nt, synthetic construct
  source 1..97: mol_type = other RNA
ttcagaggaagtgagatttgtttactgaaggagcagctcttttctgaacctgaagctgctgttacctttgccaagtgttccagccaccggccaaggg

SEQ ID NO: 1193 - RNA, 97 nt, synthetic construct
  source 1..97: mol_type = other RNA
ttcagaggaagtgagatttgtttactgaaggagcagctcttttctgaacctgaagctgctgttacctttgccaagtgttccagccaccggcccaggg

SEQ ID NO: 1194 - RNA, 97 nt, synthetic construct
  source 1..97: mol_type = other RNA
ttcagaggaagtgagatttgtttactgaaggagcagctcttttctgaacctgaagctgctgttacctttgccaagtgttccagccaccggccgaggg

SEQ ID NO: 1195 - RNA, 97 nt, synthetic construct
  source 1..97: mol_type = other RNA
ttcagaggaagtgagatttgtttactgaaggagcagctcttttctgaacctgaagctgctgttacctttgccaagtgttccagccaccggcctaagg

SEQ ID NO: 1196 - RNA, 97 nt, synthetic construct
  source 1..97: mol_type = other RNA
ttcagaggaagtgagatttgtttactgaaggagcagctcttttctgaacctgaagctgctgttacctttgccaagtgttccagccaccggcctaggg

SEQ ID NO: 1197 - RNA, 98 nt, synthetic construct
  source 1..98: mol_type = other RNA
gttcagaggaagtgagatttgtttactgaaggagcagctcttttctgaacctgaagctgctgttacctttgccaagtgttccagccaccggccaaggg

SEQ ID NO: 1198 - RNA, 98 nt, synthetic construct
  source 1..98: mol_type = other RNA
gttcagaggaagtgagatttgtttactgaaggagcagctcttttctgaacctgaagctgctgttacctttgccaagtgttccagccaccggccgaggg

SEQ ID NO: 1199 - RNA, 98 nt, synthetic construct
  source 1..98: mol_type = other RNA
gttcagaggaagtgagatttgtttactgaaggagcagctcttttctgaacctgaagctgctgttacctttgccaagtgttccagccaccggcccaggg

SEQ ID NO: 1200 - RNA, 98 nt, synthetic construct
  source 1..98: mol_type = other RNA
gttcagaggaagtgagatttgtttactgaaggagcagctcttttctgaacctgaagctgctgttacctttgccaagtgttccagccaccggcctaagg

SEQ ID NO: 1201 - RNA, 98 nt, synthetic construct
  source 1..98: mol_type = other RNA
gttcagaggaagtgagatttgtttactgaaggagcagctcttttctgaacctgaagctgctgttacctttgccaagtgttccagccaccggcctaggg

SEQ ID NO: 1202 - RNA, 99 nt, synthetic construct
  source 1..99: mol_type = other RNA
tgttcagaggaagtgagatttgtttactgaaggagcagctcttttctgaacctgaagctgctgttacctttgccaagtgttccagccaccggccgaggg

SEQ ID NO: 1203 - RNA, 99 nt, synthetic construct
  source 1..99: mol_type = other RNA
tgttcagaggaagtgagatttgtttactgaaggagcagctcttttctgaacctgaagctgctgttacctttgccaagtgttccagccaccggcctaggg

SEQ ID NO: 1204 - RNA, 99 nt, synthetic construct
  source 1..99: mol_type = other RNA
tgttcagaggaagtgagatttgtttactgaaggagcagctcttttctgaacctgaagctgctgttacctttgccaagtgttccagccaccggcctaagg

SEQ ID NO: 1205 - RNA, 99 nt, synthetic construct
  source 1..99: mol_type = other RNA
tgttcagaggaagtgagatttgtttactgaaggagcagctcttttctgaacctgaagctgctgttacctttgccaagtgttccagccaccggcccaggg

SEQ ID NO: 1206 - RNA, 99 nt, synthetic construct
  source 1..99: mol_type = other RNA
tgttcagaggaagtgagatttgtttactgaaggagcagctcttttctgaacctgaagctgctgttacctttgccaagtgttccagccaccggccaaggg

SEQ ID NO: 1207 - RNA, 100 nt, synthetic construct
  source 1..100: mol_type = other RNA
gtgttcagaggaagtgagatttgtttactgaaggagcagctcttttctgaacctgaagctgctgttacctttgccaagtgttccagccaccggcccaggg

SEQ ID NO: 1208 - RNA, 100 nt, synthetic construct
  source 1..100: mol_type = other RNA
gtgttcagaggaagtgagatttgtttactgaaggagcagctcttttctgaacctgaagctgctgttacctttgccaagtgttccagccaccggccaaggg

SEQ ID NO: 1209 - RNA, 100 nt, synthetic construct
  source 1..100: mol_type = other RNA
gtgttcagaggaagtgagatttgtttactgaaggagcagctcttttctgaacctgaagctgctgttacctttgccaagtgttccagccaccggcctaggg

SEQ ID NO: 1210 - RNA, 100 nt, synthetic construct
  source 1..100: mol_type = other RNA
gtgttcagaggaagtgagatttgtttactgaaggagcagctcttttctgaacctgaagctgctgttacctttgccaagtgttccagccaccggcctaagg

SEQ ID NO: 1211 - RNA, 100 nt, synthetic construct
  source 1..100: mol_type = other RNA
gtgttcagaggaagtgagatttgtttactgaaggagcagctcttttctgaacctgaagctgctgttacctttgccaagtgttccagccaccggccgaggg

SEQ ID NO: 1212 - RNA, 20 nt, synthetic construct
  source 1..20: mol_type = other RNA
gatttgtttactgaaggagc

SEQ ID NO: 1213 - RNA, 20 nt, synthetic construct
  source 1..20: mol_type = other RNA
cagctcttttctgaacctga

SEQ ID NO: 1214 - RNA, 20 nt, synthetic construct
  source 1..20: mol_type = other RNA
tgagatttgtttactgaagg

SEQ ID NO: 1215 - RNA, 20 nt, synthetic construct
  source 1..20: mol_type = other RNA
cagccaccggccgagggcaa

SEQ ID NO: 1216 - RNA, 20 nt, synthetic construct
  source 1..20: mol_type = other RNA
aattctaaacatggtgttca

SEQ ID NO: 1217 - RNA, 20 nt, synthetic construct
  source 1..20: mol_type = other RNA
tgttcagaggaagtgagatt

SEQ ID NO: 1218 - RNA, 20 nt, synthetic construct
  source 1..20: mol_type = other RNA
cagccaccggcctagggcaa

SEQ ID NO: 1219 - RNA, 20 nt, synthetic construct
  source 1..20: mol_type = other RNA
cagccaccggcctaaggcaa

SEQ ID NO: 1220 - RNA, 20 nt, synthetic construct
  source 1..20: mol_type = other RNA
aacatggtgttcagaggaag

SEQ ID NO: 1221 - RNA, 20 nt, synthetic construct
  source 1..20: mol_type = other RNA
gtgttccagccaccggccta

SEQ ID NO: 1222 - RNA, 20 nt, synthetic construct
  source 1..20: mol_type = other RNA
ttctaaacatggtgttcaga

SEQ ID NO: 1223 - RNA, 20 nt, synthetic construct
  source 1..20: mol_type = other RNA
aagtgagatttgtttactga

SEQ ID NO: 1224 - RNA, 20 nt, synthetic construct
  source 1..20: mol_type = other RNA
aagtgttccagccaccggcc

SEQ ID NO: 1225 - RNA, 20 nt, synthetic construct
  source 1..20: mol_type = other RNA
agtgttccagccaccggcca

SEQ ID NO: 1226 - RNA, 20 nt, synthetic construct
  source 1..20: mol_type = other RNA
agtgttccagccaccggcct

SEQ ID NO: 1227 - RNA, 20 nt, synthetic construct
  source 1..20: mol_type = other RNA
tttgccaagtgttccagcca

SEQ ID NO: 1228 - RNA, 20 nt, synthetic construct
  source 1..20: mol_type = other RNA
ctgaaggagcagctcttttc

SEQ ID NO: 1229 - RNA, 20 nt, synthetic construct
  source 1..20: mol_type = other RNA
gagcagctcttttctgaacc

SEQ ID NO: 1230 - RNA, 20 nt, synthetic construct
  source 1..20: mol_type = other RNA
gtgttccagccaccggccaa

SEQ ID NO: 1231 - RNA, 20 nt, synthetic construct
  source 1..20: mol_type = other RNA
tgttccagccaccggcctag

SEQ ID NO: 1232 - RNA, 20 nt, synthetic construct
  source 1..20: mol_type = other RNA
tgttccagccaccggccgag

SEQ ID NO: 1233 - RNA, 20 nt, synthetic construct
  source 1..20: mol_type = other RNA
aggaagtgagatttgtttac

SEQ ID NO: 1234 - RNA, 20 nt, synthetic construct
  source 1..20: mol_type = other RNA
agtgagatttgtttactgaa

SEQ ID NO: 1235 - RNA, 20 nt, synthetic construct
  source 1..20: mol_type = other RNA
tgttccagccaccggccaag

SEQ ID NO: 1236 - RNA, 20 nt, synthetic construct
  source 1..20: mol_type = other RNA
agtgttccagccaccggccg

SEQ ID NO: 1237 - RNA, 20 nt, synthetic construct
  source 1..20: mol_type = other RNA
gtgttccagccaccggccga

SEQ ID NO: 1238 - RNA, 20 nt, synthetic construct
  source 1..20: mol_type = other RNA
taattctaaacatggtgttc

SEQ ID NO: 1239 - RNA, 20 nt, synthetic construct
  source 1..20: mol_type = other RNA
attctaaacatggtgttcag

SEQ ID NO: 1240 - RNA, 20 nt, synthetic construct
  source 1..20: mol_type = other RNA
catggtgttcagaggaagtg

SEQ ID NO: 1241 - RNA, 20 nt, synthetic construct
  source 1..20: mol_type = other RNA
cagccaccggccaagggcaa

SEQ ID NO: 1242 - RNA, 20 nt, synthetic construct
  source 1..20: mol_type = other RNA
tgttccagccaccggcctaa

SEQ ID NO: 1243 - RNA, 20 nt, synthetic construct
  source 1..20: mol_type = other RNA
taaacatggtgttcagagga

SEQ ID NO: 1244 - RNA, 20 nt, synthetic construct
  source 1..20: mol_type = other RNA
gaagtgagatttgtttactg

SEQ ID NO: 1245 - RNA, 116 nt, synthetic construct
  source 1..116: mol_type = other RNA
gctctttgtgttcattgcccgttttagagctagaaatagcaagttaaaataaggctagtccgttatcaacttgaaaaagtggcaccgagtcggtgcaccggccgagggcaatgaac

SEQ ID NO: 1246 - RNA, 116 nt, synthetic construct
  source 1..116: mol_type = other RNA
gctctttgtgttcattgcccgttttagagctagaaatagcaagttaaaataaggctagtccgttatcaacttgaaaaagtggcaccgagtcggtgcaccggccaagggcaatgaac

SEQ ID NO: 1247 - RNA, 116 nt, synthetic construct
  source 1..116: mol_type = other RNA
gctctttgtgttcattgcccgttttagagctagaaatagcaagttaaaataaggctagtccgttatcaacttgaaaaagtggcaccgagtcggtgcaccggcccagggcaatgaac

SEQ ID NO: 1248 - RNA, 116 nt, synthetic construct
  source 1..116: mol_type = other RNA
gctctttgtgttcattgcccgttttagagctagaaatagcaagttaaaataaggctagtccgttatcaacttgaaaaagtggcaccgagtcggtgcaccggcctagggcaatgaac

SEQ ID NO: 1249 - RNA, 117 nt, synthetic construct
  source 1..117: mol_type = other RNA
gctctttgtgttcattgcccgttttagagctagaaatagcaagttaaaataaggctagtccgttatcaacttgaaaaagtggcaccgagtcggtgcaccggccaagggcaatgaaca

SEQ ID NO: 1250 - RNA, 117 nt, synthetic construct
  source 1..117: mol_type = other RNA
gctctttgtgttcattgcccgttttagagctagaaatagcaagttaaaataaggctagtccgttatcaacttgaaaaagtggcaccgagtcggtgcaccggccgagggcaatgaaca

SEQ ID NO: 1251 - RNA, 117 nt, synthetic construct
  source 1..117: mol_type = other RNA
gctctttgtgttcattgcccgttttagagctagaaatagcaagttaaaataaggctagtccgttatcaacttgaaaaagtggcaccgagtcggtgcaccggcccagggcaatgaaca

SEQ ID NO: 1252 - RNA, 117 nt, synthetic construct
  source 1..117: mol_type = other RNA
gctctttgtgttcattgcccgttttagagctagaaatagcaagttaaaataaggctagtccgttatcaacttgaaaaagtggcaccgagtcggtgcaccggcctagggcaatgaaca

SEQ ID NO: 1253 - RNA, 118 nt, synthetic construct
  source 1..118: mol_type = other RNA
gctctttgtgttcattgcccgttttagagctagaaatagcaagttaaaataaggctagtccgttatcaacttgaaaaagtggcaccgagtcggtgcaccggccaagggcaatgaacac

SEQ ID NO: 1254 - RNA, 118 nt, synthetic construct
  source 1..118: mol_type = other RNA
gctctttgtgttcattgcccgttttagagctagaaatagcaagttaaaataaggctagtccgttatcaacttgaaaaagtggcaccgagtcggtgcaccggccgagggcaatgaacac

SEQ ID NO: 1255 - RNA, 118 nt, synthetic construct
  source 1..118: mol_type = other RNA
gctctttgtgttcattgcccgttttagagctagaaatagcaagttaaaataaggctagtccgttatcaacttgaaaaagtggcaccgagtcggtgcaccggcctagggcaatgaacac

SEQ ID NO: 1256 - RNA, 118 nt, synthetic construct
  source 1..118: mol_type = other RNA
gctctttgtgttcattgcccgttttagagctagaaatagcaagttaaaataaggctagtccgttatcaacttgaaaaagtggcaccgagtcggtgcaccggcccagggcaatgaacac

SEQ ID NO: 1257 - RNA, 119 nt, synthetic construct
  source 1..119: mol_type = other RNA
gctctttgtgttcattgcccgttttagagctagaaatagcaagttaaaataaggctagtccgttatcaacttgaaaaagtggcaccgagtcggtgcgccaccggccgagggcaatgaac

SEQ ID NO: 1258 - RNA, 119 nt, synthetic construct
  source 1..119: mol_type = other RNA
gctctttgtgttcattgcccgttttagagctagaaatagcaagttaaaataaggctagtccgttatcaacttgaaaaagtggcaccgagtcggtgcaccggccgagggcaatgaacaca

SEQ ID NO: 1259 - RNA, 119 nt, synthetic construct
  source 1..119: mol_type = other RNA
gctctttgtgttcattgcccgttttagagctagaaatagcaagttaaaataaggctagtccgttatcaacttgaaaaagtggcaccgagtcggtgcgccaccggcctagggcaatgaac

SEQ ID NO: 1260 - RNA, 119 nt, synthetic construct
  source 1..119: mol_type = other RNA
gctctttgtgttcattgcccgttttagagctagaaatagcaagttaaaataaggctagtccgttatcaacttgaaaaagtggcaccgagtcggtgcaccggcccagggcaatgaacaca

SEQ ID NO: 1261 - RNA, 119 nt, synthetic construct
  source 1..119: mol_type = other RNA
gctctttgtgttcattgcccgttttagagctagaaatagcaagttaaaataaggctagtccgttatcaacttgaaaaagtggcaccgagtcggtgcgccaccggccaagggcaatgaac

SEQ ID NO: 1262 - RNA, 119 nt, synthetic construct
  source 1..119: mol_type = other RNA
gctctttgtgttcattgcccgttttagagctagaaatagcaagttaaaataaggctagtccgttatcaacttgaaaaagtggcaccgagtcggtgcaccggcctagggcaatgaacaca

SEQ ID NO: 1263 - RNA, 119 nt, synthetic construct
  source 1..119: mol_type = other RNA
gctctttgtgttcattgcccgttttagagctagaaatagcaagttaaaataaggctagtccgttatcaacttgaaaaagtggcaccgagtcggtgcgccaccggcccagggcaatgaac

SEQ ID NO: 1264 - RNA, 119 nt, synthetic construct
  source 1..119: mol_type = other RNA
gctctttgtgttcattgcccgttttagagctagaaatagcaagttaaaataaggctagtccgttatcaacttgaaaaagtggcaccgagtcggtgcaccggccaagggcaatgaacaca

SEQ ID NO: 1265 - RNA, 120 nt, synthetic construct
  source 1..120: mol_type = other RNA
gctctttgtgttcattgcccgttttagagctagaaatagcaagttaaaataaggctagtccgttatcaacttgaaaaagtggcaccgagtcggtgcaccggccaagggcaatgaacacaa

SEQ ID NO: 1266 - RNA, 120 nt, synthetic construct
  source 1..120: mol_type = other RNA
gctctttgtgttcattgcccgttttagagctagaaatagcaagttaaaataaggctagtccgttatcaacttgaaaaagtggcaccgagtcggtgcgccaccggccaagggcaatgaaca

SEQ ID NO: 1267 - RNA, 120 nt, synthetic construct
  source 1..120: mol_type = other RNA
gctctttgtgttcattgcccgttttagagctagaaatagcaagttaaaataaggctagtccgttatcaacttgaaaaagtggcaccgagtcggtgcgccaccggccgagggcaatgaaca

SEQ ID NO: 1268 - RNA, 120 nt, synthetic construct
  source 1..120: mol_type = other RNA
gctctttgtgttcattgcccgttttagagctagaaatagcaagttaaaataaggctagtccgttatcaacttgaaaaagtggcaccgagtcggtgcagccaccggccaagggcaatgaac

SEQ ID NO: 1269 - RNA, 120 nt, synthetic construct
  source 1..120: mol_type = other RNA
gctctttgtgttcattgcccgttttagagctagaaatagcaagttaaaataaggctagtccgttatcaacttgaaaaagtggcaccgagtcggtgcgccaccggcccagggcaatgaaca

SEQ ID NO: 1270 - RNA, 120 nt, synthetic construct
  source 1..120: mol_type = other RNA
gctctttgtgttcattgcccgttttagagctagaaatagcaagttaaaataaggctagtccgttatcaacttgaaaaagtggcaccgagtcggtgcagccaccggcccagggcaatgaac

SEQ ID NO: 1271 - RNA, 120 nt, synthetic construct
  source 1..120: mol_type = other RNA
gctctttgtgttcattgcccgttttagagctagaaatagcaagttaaaataaggctagtccgttatcaacttgaaaaagtggcaccgagtcggtgcagccaccggccgagggcaatgaac

SEQ ID NO: 1272 - RNA, 120 nt, synthetic construct
  source 1..120: mol_type = other RNA
gctctttgtgttcattgcccgttttagagctagaaatagcaagttaaaataaggctagtccgttatcaacttgaaaaagtggcaccgagtcggtgcaccggcctagggcaatgaacacaa

SEQ ID NO: 1273 - RNA, 120 nt, synthetic construct
  source 1..120: mol_type = other RNA
gctctttgtgttcattgcccgttttagagctagaaatagcaagttaaaataaggctagtccgttatcaacttgaaaaagtggcaccgagtcggtgcgccaccggcctagggcaatgaaca

SEQ ID NO: 1274 - RNA, 120 nt, synthetic construct
  source 1..120: mol_type = other RNA
gctctttgtgttcattgcccgttttagagctagaaatagcaagttaaaataaggctagtccgttatcaacttgaaaaagtggcaccgagtcggtgcaccggcccagggcaatgaacacaa

SEQ ID NO: 1275 - RNA, 120 nt, synthetic construct
  source 1..120: mol_type = other RNA
gctctttgtgttcattgcccgttttagagctagaaatagcaagttaaaataaggctagtccgttatcaacttgaaaaagtggcaccgagtcggtgcaccggccgagggcaatgaacacaa

SEQ ID NO: 1276 - RNA, 120 nt, synthetic construct
  source 1..120: mol_type = other RNA
gctctttgtgttcattgcccgttttagagctagaaatagcaagttaaaataaggctagtccgttatcaacttgaaaaagtggcaccgagtcggtgcagccaccggcctagggcaatgaac

SEQ ID NO: 1277 - RNA, 121 nt, synthetic construct
  source 1..121: mol_type = other RNA
gctctttgtgttcattgcccgttttagagctagaaatagcaagttaaaataaggctagtccgttatcaacttgaaaaagtggcaccgagtcggtgcaccggccgagggcaatgaacacaaa

SEQ ID NO: 1278 - RNA, 121 nt, synthetic construct
  source 1..121: mol_type = other RNA
gctctttgtgttcattgcccgttttagagctagaaatagcaagttaaaataaggctagtccgttatcaacttgaaaaagtggcaccgagtcggtgcaccggcctagggcaatgaacacaaa

SEQ ID NO: 1279 - RNA, 121 nt, synthetic construct
  source 1..121: mol_type = other RNA
gctctttgtgttcattgcccgttttagagctagaaatagcaagttaaaataaggctagtccgttatcaacttgaaaaagtggcaccgagtcggtgcgccaccggcccagggcaatgaacac

SEQ ID NO: 1280 - RNA, 121 nt, synthetic construct
  source 1..121: mol_type = other RNA
gctctttgtgttcattgcccgttttagagctagaaatagcaagttaaaataaggctagtccgttatcaacttgaaaaagtggcaccgagtcggtgcagccaccggccaagggcaatgaaca

SEQ ID NO: 1281 - RNA, 121 nt, synthetic construct
  source 1..121: mol_type = other RNA
gctctttgtgttcattgcccgttttagagctagaaatagcaagttaaaataaggctagtccgttatcaacttgaaaaagtggcaccgagtcggtgcaccggcccagggcaatgaacacaaa

SEQ ID NO: 1282 - RNA, 121 nt, synthetic construct
  source 1..121: mol_type = other RNA
gctctttgtgttcattgcccgttttagagctagaaatagcaagttaaaataaggctagtccgttatcaacttgaaaaagtggcaccgagtcggtgcagccaccggccgagggcaatgaaca

SEQ ID NO: 1283 - RNA, 121 nt, synthetic construct
  source 1..121: mol_type = other RNA
gctctttgtgttcattgcccgttttagagctagaaatagcaagttaaaataaggctagtccgttatcaacttgaaaaagtggcaccgagtcggtgcagccaccggcctagggcaatgaaca

SEQ ID NO: 1284 - RNA, 121 nt, synthetic construct
  source 1..121: mol_type = other RNA
gctctttgtgttcattgcccgttttagagctagaaatagcaagttaaaataaggctagtccgttatcaacttgaaaaagtggcaccgagtcggtgcaccggccaagggcaatgaacacaaa

SEQ ID NO: 1285 - RNA, 121 nt, synthetic construct
  source 1..121: mol_type = other RNA
gctctttgtgttcattgcccgttttagagctagaaatagcaagttaaaataaggctagtccgttatcaacttgaaaaagtggcaccgagtcggtgcagccaccggcccagggcaatgaaca

SEQ ID NO: 1286 - RNA, 121 nt, synthetic construct
  source 1..121: mol_type = other RNA
gctctttgtgttcattgcccgttttagagctagaaatagcaagttaaaataaggctagtccgttatcaacttgaaaaagtggcaccgagtcggtgcgccaccggccaagggcaatgaacac

SEQ ID NO: 1287 - RNA, 121 nt, synthetic construct
  source 1..121: mol_type = other RNA
gctctttgtgttcattgcccgttttagagctagaaatagcaagttaaaataaggctagtccgttatcaacttgaaaaagtggcaccgagtcggtgcgccaccggccgagggcaatgaacac

SEQ ID NO: 1288 - RNA, 121 nt, synthetic construct
  source 1..121: mol_type = other RNA
gctctttgtgttcattgcccgttttagagctagaaatagcaagttaaaataaggctagtccgttatcaacttgaaaaagtggcaccgagtcggtgcgccaccggcctagggcaatgaacac

SEQ ID NO: 1289 - RNA, 122 nt, synthetic construct
  source 1..122: mol_type = other RNA
gctctttgtgttcattgcccgttttagagctagaaatagcaagttaaaataaggctagtccgttatcaacttgaaaaagtggcaccgagtcggtgcaccggccgagggcaatgaacacaaag

SEQ ID NO: 1290 - RNA, 122 nt, synthetic construct
  source 1..122: mol_type = other RNA
gctctttgtgttcattgcccgttttagagctagaaatagcaagttaaaataaggctagtccgttatcaacttgaaaaagtggcaccgagtcggtgcgccaccggcctagggcaatgaacaca

SEQ ID NO: 1291 - RNA, 122 nt, synthetic construct
  source 1..122: mol_type = other RNA
gctctttgtgttcattgcccgttttagagctagaaatagcaagttaaaataaggctagtccgttatcaacttgaaaaagtggcaccgagtcggtgcaccggcctagggcaatgaacacaaag

SEQ ID NO: 1292 - RNA, 122 nt, synthetic construct
  source 1..122: mol_type = other RNA
gctctttgtgttcattgcccgttttagagctagaaatagcaagttaaaataaggctagtccgttatcaacttgaaaaagtggcaccgagtcggtgcagccaccggccaagggcaatgaacac

SEQ ID NO: 1293 - RNA, 122 nt, synthetic construct
  source 1..122: mol_type = other RNA
gctctttgtgttcattgcccgttttagagctagaaatagcaagttaaaataaggctagtccgttatcaacttgaaaaagtggcaccgagtcggtgcaccggccaagggcaatgaacacaaag

SEQ ID NO: 1294 - RNA, 122 nt, synthetic construct
  source 1..122: mol_type = other RNA
gctctttgtgttcattgcccgttttagagctagaaatagcaagttaaaataaggctagtccgttatcaacttgaaaaagtggcaccgagtcggtgcagccaccggccgagggcaatgaacac

SEQ ID NO: 1295 - RNA, 122 nt, synthetic construct
  source 1..122: mol_type = other RNA
gctctttgtgttcattgcccgttttagagctagaaatagcaagttaaaataaggctagtccgttatcaacttgaaaaagtggcaccgagtcggtgcgccaccggccaagggcaatgaacaca

SEQ ID NO: 1296 - RNA, 122 nt, synthetic construct
  source 1..122: mol_type = other RNA
gctctttgtgttcattgcccgttttagagctagaaatagcaagttaaaataaggctagtccgttatcaacttgaaaaagtggcaccgagtcggtgcaccggcccagggcaatgaacacaaag

SEQ ID NO: 1297 - RNA, 122 nt, synthetic construct
  source 1..122: mol_type = other RNA
gctctttgtgttcattgcccgttttagagctagaaatagcaagttaaaataaggctagtccgttatcaacttgaaaaagtggcaccgagtcggtgcagccaccggcctagggcaatgaacac

SEQ ID NO: 1298 - RNA, 122 nt, synthetic construct
  source 1..122: mol_type = other RNA
gctctttgtgttcattgcccgttttagagctagaaatagcaagttaaaataaggctagtccgttatcaacttgaaaaagtggcaccgagtcggtgcgccaccggccgagggcaatgaacaca

SEQ ID NO: 1299 - RNA, 122 nt, synthetic construct
  source 1..122: mol_type = other RNA
gctctttgtgttcattgcccgttttagagctagaaatagcaagttaaaataaggctagtccgttatcaacttgaaaaagtggcaccgagtcggtgcagccaccggcccagggcaatgaacac

SEQ ID NO: 1300 - RNA, 122 nt, synthetic construct
  source 1..122: mol_type = other RNA
gctctttgtgttcattgcccgttttagagctagaaatagcaagttaaaataaggctagtccgttatcaacttgaaaaagtggcaccgagtcggtgcgccaccggcccagggcaatgaacaca

SEQ ID NO: 1301 - RNA, 123 nt, synthetic construct
  source 1..123: mol_type = other RNA
gctctttgtgttcattgcccgttttagagctagaaatagcaagttaaaataaggctagtccgttatcaacttgaaaaagtggcaccgagtcggtgctccagccaccggccaagggcaatgaac

SEQ ID NO: 1302 - RNA, 123 nt, synthetic construct
  source 1..123: mol_type = other RNA
gctctttgtgttcattgcccgttttagagctagaaatagcaagttaaaataaggctagtccgttatcaacttgaaaaagtggcaccgagtcggtgctccagccaccggcctagggcaatgaac

SEQ ID NO: 1303 - RNA, 123 nt, synthetic construct
  source 1..123: mol_type = other RNA
gctctttgtgttcattgcccgttttagagctagaaatagcaagttaaaataaggctagtccgttatcaacttgaaaaagtggcaccgagtcggtgcaccggcccagggcaatgaacttttttt

SEQ ID NO: 1304 - RNA, 123 nt, synthetic construct
  source 1..123: mol_type = other RNA
gctctttgtgttcattgcccgttttagagctagaaatagcaagttaaaataaggctagtccgttatcaacttgaaaaagtggcaccgagtcggtgctccagccaccggccgagggcaatgaac

SEQ ID NO: 1305 - RNA, 123 nt, synthetic construct
  source 1..123: mol_type = other RNA
gctctttgtgttcattgcccgttttagagctagaaatagcaagttaaaataaggctagtccgttatcaacttgaaaaagtggcaccgagtcggtgctccagccaccggcccagggcaatgaac

SEQ ID NO: 1306 - RNA, 123 nt, synthetic construct
  source 1..123: mol_type = other RNA
gctctttgtgttcattgcccgttttagagctagaaatagcaagttaaaataaggctagtccgttatcaacttgaaaaagtggcaccgagtcggtgcagccaccggcccagggcaatgaacaca

SEQ ID NO: 1307 - RNA, 123 nt, synthetic construct
  source 1..123: mol_type = other RNA
gctctttgtgttcattgcccgttttagagctagaaatagcaagttaaaataaggctagtccgttatcaacttgaaaaagtggcaccgagtcggtgcgccaccggccaagggcaatgaacacaa

SEQ ID NO: 1308 - RNA, 123 nt, synthetic construct
  source 1..123: mol_type = other RNA
gctctttgtgttcattgcccgttttagagctagaaatagcaagttaaaataaggctagtccgttatcaacttgaaaaagtggcaccgagtcggtgcagccaccggcctagggcaatgaacaca

SEQ ID NO: 1309 - RNA, 123 nt, synthetic construct
  source 1..123: mol_type = other RNA
gctctttgtgttcattgcccgttttagagctagaaatagcaagttaaaataaggctagtccgttatcaacttgaaaaagtggcaccgagtcggtgcgccaccggcctagggcaatgaacacaa

SEQ ID NO: 1310 - RNA, 123 nt, synthetic construct
  source 1..123: mol_type = other RNA
gctctttgtgttcattgcccgttttagagctagaaatagcaagttaaaataaggctagtccgttatcaacttgaaaaagtggcaccgagtcggtgcagccaccggccgagggcaatgaacaca

SEQ ID NO: 1311 - RNA, 123 nt, synthetic construct
  source 1..123: mol_type = other RNA
gctctttgtgttcattgcccgttttagagctagaaatagcaagttaaaataaggctagtccgttatcaacttgaaaaagtggcaccgagtcggtgcaccggcctagggcaatgaacttttttt

SEQ ID NO: 1312 - RNA, 123 nt, synthetic construct
  source 1..123: mol_type = other RNA
gctctttgtgttcattgcccgttttagagctagaaatagcaagttaaaataaggctagtccgttatcaacttgaaaaagtggcaccgagtcggtgcgccaccggcccagggcaatgaacacaa

SEQ ID NO: 1313 - RNA, 123 nt, synthetic construct
  source 1..123: mol_type = other RNA
gctctttgtgttcattgcccgttttagagctagaaatagcaagttaaaataaggctagtccgttatcaacttgaaaaagtggcaccgagtcggtgcagccaccggccaagggcaatgaacaca

SEQ ID NO: 1314 - RNA, 123 nt, synthetic construct
  source 1..123: mol_type = other RNA
gctctttgtgttcattgcccgttttagagctagaaatagcaagttaaaataaggctagtccgttatcaacttgaaaaagtggcaccgagtcggtgcaccggccaagggcaatgaacttttttt

SEQ ID NO: 1315 - RNA, 123 nt, synthetic construct
  source 1..123: mol_type = other RNA
gctctttgtgttcattgcccgttttagagctagaaatagcaagttaaaataaggctagtccgttatcaacttgaaaaagtggcaccgagtcggtgcaccggccgagggcaatgaacttttttt

SEQ ID NO: 1316 - RNA, 123 nt, synthetic construct
  source 1..123: mol_type = other RNA
gctctttgtgttcattgcccgttttagagctagaaatagcaagttaaaataaggctagtccgttatcaacttgaaaaagtggcaccgagtcggtgcgccaccggccgagggcaatgaacacaa

SEQ ID NO: 1317 - RNA, 124 nt, synthetic construct
  source 1..124: mol_type = other RNA
gctctttgtgttcattgcccgttttagagctagaaatagcaagttaaaataaggctagtccgttatcaacttgaaaaagtggcaccgagtcggtgcgccaccggcccagggcaatgaacacaaa

SEQ ID NO: 1318 - RNA, 124 nt, synthetic construct
  source 1..124: mol_type = other RNA
gctctttgtgttcattgcccgttttagagctagaaatagcaagttaaaataaggctagtccgttatcaacttgaaaaagtggcaccgagtcggtgctccagccaccggcctagggcaatgaaca

SEQ ID NO: 1319 - RNA, 124 nt, synthetic construct
  source 1..124: mol_type = other RNA
gctctttgtgttcattgcccgttttagagctagaaatagcaagttaaaataaggctagtccgttatcaacttgaaaaagtggcaccgagtcggtgcgccaccggccaagggcaatgaacacaaa

SEQ ID NO: 1320 - RNA, 124 nt, synthetic construct
  source 1..124: mol_type = other RNA
gctctttgtgttcattgcccgttttagagctagaaatagcaagttaaaataaggctagtccgttatcaacttgaaaaagtggcaccgagtcggtgcagccaccggcccagggcaatgaacacaa

SEQ ID NO: 1321 - RNA, 124 nt, synthetic construct
  source 1..124: mol_type = other RNA
gctctttgtgttcattgcccgttttagagctagaaatagcaagttaaaataaggctagtccgttatcaacttgaaaaagtggcaccgagtcggtgcagccaccggccaagggcaatgaacacaa

SEQ ID NO: 1322 - RNA, 124 nt, synthetic construct
  source 1..124: mol_type = other RNA
gctctttgtgttcattgcccgttttagagctagaaatagcaagttaaaataaggctagtccgttatcaacttgaaaaagtggcaccgagtcggtgcagccaccggccgagggcaatgaacacaa

SEQ ID NO: 1323 - RNA, 124 nt, synthetic construct
  source 1..124: mol_type = other RNA
gctctttgtgttcattgcccgttttagagctagaaatagcaagttaaaataaggctagtccgttatcaacttgaaaaagtggcaccgagtcggtgcttccagccaccggcctagggcaatgaac

SEQ ID NO: 1324 - RNA, 124 nt, synthetic construct
  source 1..124: mol_type = other RNA
gctctttgtgttcattgcccgttttagagctagaaatagcaagttaaaataaggctagtccgttatcaacttgaaaaagtggcaccgagtcggtgcgccaccggcctagggcaatgaacacaaa

SEQ ID NO: 1325 - RNA, 124 nt, synthetic construct
  source 1..124: mol_type = other RNA
gctctttgtgttcattgcccgttttagagctagaaatagcaagttaaaataaggctagtccgttatcaacttgaaaaagtggcaccgagtcggtgcttccagccaccggccaagggcaatgaac

SEQ ID NO: 1326 - RNA, 124 nt, synthetic construct
  source 1..124: mol_type = other RNA
gctctttgtgttcattgcccgttttagagctagaaatagcaagttaaaataaggctagtccgttatcaacttgaaaaagtggcaccgagtcggtgcgccaccggccgagggcaatgaacacaaa

SEQ ID NO: 1327 - RNA, 124 nt, synthetic construct
  source 1..124: mol_type = other RNA
gctctttgtgttcattgcccgttttagagctagaaatagcaagttaaaataaggctagtccgttatcaacttgaaaaagtggcaccgagtcggtgcagccaccggcctagggcaatgaacacaa

SEQ ID NO: 1328 - RNA, 124 nt, synthetic construct
  source 1..124: mol_type = other RNA
gctctttgtgttcattgcccgttttagagctagaaatagcaagttaaaataaggctagtccgttatcaacttgaaaaagtggcaccgagtcggtgcaccggcccagggcaatgaacattttttt

SEQ ID NO: 1329 - RNA, 124 nt, synthetic construct
  source 1..124: mol_type = other RNA
gctctttgtgttcattgcccgttttagagctagaaatagcaagttaaaataaggctagtccgttatcaacttgaaaaagtggcaccgagtcggtgcaccggcctagggcaatgaacattttttt

SEQ ID NO: 1330 - RNA, 124 nt, synthetic construct
  source 1..124: mol_type = other RNA
gctctttgtgttcattgcccgttttagagctagaaatagcaagttaaaataaggctagtccgttatcaacttgaaaaagtggcaccgagtcggtgctccagccaccggccgagggcaatgaaca

SEQ ID NO: 1331 - RNA, 124 nt, synthetic construct
  source 1..124: mol_type = other RNA
gctctttgtgttcattgcccgttttagagctagaaatagcaagttaaaataaggctagtccgttatcaacttgaaaaagtggcaccgagtcggtgcttccagccaccggccgagggcaatgaac

SEQ ID NO: 1332 - RNA, 124 nt, synthetic construct
  source 1..124: mol_type = other RNA
gctctttgtgttcattgcccgttttagagctagaaatagcaagttaaaataaggctagtccgttatcaacttgaaaaagtggcaccgagtcggtgctccagccaccggcccagggcaatgaaca

SEQ ID NO: 1333 - RNA, 124 nt, synthetic construct
  source 1..124: mol_type = other RNA
gctctttgtgttcattgcccgttttagagctagaaatagcaagttaaaataaggctagtccgttatcaacttgaaaaagtggcaccgagtcggtgctccagccaccggccaagggcaatgaaca

SEQ ID NO: 1334 - RNA, 124 nt, synthetic construct
  source 1..124: mol_type = other RNA
gctctttgtgttcattgcccgttttagagctagaaatagcaagttaaaataaggctagtccgttatcaacttgaaaaagtggcaccgagtcggtgcaccggccaagggcaatgaacattttttt

SEQ ID NO: 1335 - RNA, 124 nt, synthetic construct
  source 1..124: mol_type = other RNA
gctctttgtgttcattgcccgttttagagctagaaatagcaagttaaaataaggctagtccgttatcaacttgaaaaagtggcaccgagtcggtgcaccggccgagggcaatgaacattttttt

SEQ ID NO: 1336 - RNA, 124 nt, synthetic construct
  source 1..124: mol_type = other RNA
gctctttgtgttcattgcccgttttagagctagaaatagcaagttaaaataaggctagtccgttatcaacttgaaaaagtggcaccgagtcggtgcttccagccaccggcccagggcaatgaac

SEQ ID NO: 1337 - RNA, 125 nt, synthetic construct
  source 1..125: mol_type = other RNA
gctctttgtgttcattgcccgttttagagctagaaatagcaagttaaaataaggctagtccgttatcaacttgaaaaagtggcaccgagtcggtgcagccaccggcctagggcaatgaacacaaa

SEQ ID NO: 1338 - RNA, 125 nt, synthetic construct
  source 1..125: mol_type = other RNA
gctctttgtgttcattgcccgttttagagctagaaatagcaagttaaaataaggctagtccgttatcaacttgaaaaagtggcaccgagtcggtgcgccaccggccaagggcaatgaacacaaag

SEQ ID NO: 1339 - RNA, 125 nt, synthetic construct
  source 1..125: mol_type = other RNA
gctctttgtgttcattgcccgttttagagctagaaatagcaagttaaaataaggctagtccgttatcaacttgaaaaagtggcaccgagtcggtgcagccaccggccaagggcaatgaacacaaa

SEQ ID NO: 1340 - RNA, 125 nt, synthetic construct
  source 1..125: mol_type = other RNA
gctctttgtgttcattgcccgttttagagctagaaatagcaagttaaaataaggctagtccgttatcaacttgaaaaagtggcaccgagtcggtgcgccaccggcccagggcaatgaacacaaag

SEQ ID NO: 1341 - RNA, 125 nt, synthetic construct
  source 1..125: mol_type = other RNA
gctctttgtgttcattgcccgttttagagctagaaatagcaagttaaaataaggctagtccgttatcaacttgaaaaagtggcaccgagtcggtgcagccaccggcccagggcaatgaacacaaa

SEQ ID NO: 1342 - RNA, 125 nt, synthetic construct
  source 1..125: mol_type = other RNA
gctctttgtgttcattgcccgttttagagctagaaatagcaagttaaaataaggctagtccgttatcaacttgaaaaagtggcaccgagtcggtgcaccggcctagggcaatgaacacttttttt

SEQ ID NO: 1343 - RNA, 125 nt, synthetic construct
  source 1..125: mol_type = other RNA
gctctttgtgttcattgcccgttttagagctagaaatagcaagttaaaataaggctagtccgttatcaacttgaaaaagtggcaccgagtcggtgcttccagccaccggccaagggcaatgaaca

SEQ ID NO: 1344 - RNA, 125 nt, synthetic construct
  source 1..125: mol_type = other RNA
gctctttgtgttcattgcccgttttagagctagaaatagcaagttaaaataaggctagtccgttatcaacttgaaaaagtggcaccgagtcggtgcgccaccggccgagggcaatgaacacaaag

SEQ ID NO: 1345 - RNA, 125 nt, synthetic construct
  source 1..125: mol_type = other RNA
gctctttgtgttcattgcccgttttagagctagaaatagcaagttaaaataaggctagtccgttatcaacttgaaaaagtggcaccgagtcggtgctccagccaccggcctagggcaatgaacac

SEQ ID NO: 1346 - RNA, 125 nt, synthetic construct
  source 1..125: mol_type = other RNA
gctctttgtgttcattgcccgttttagagctagaaatagcaagttaaaataaggctagtccgttatcaacttgaaaaagtggcaccgagtcggtgcaccggcccagggcaatgaacacttttttt

SEQ ID NO: 1347 - RNA, 125 nt, synthetic construct
  source 1..125: mol_type = other RNA
gctctttgtgttcattgcccgttttagagctagaaatagcaagttaaaataaggctagtccgttatcaacttgaaaaagtggcaccgagtcggtgctccagccaccggccaagggcaatgaacac

SEQ ID NO: 1348 - RNA, 125 nt, synthetic construct
  source 1..125: mol_type = other RNA
gctctttgtgttcattgcccgttttagagctagaaatagcaagttaaaataaggctagtccgttatcaacttgaaaaagtggcaccgagtcggtgcgccaccggcctagggcaatgaacacaaag

SEQ ID NO: 1349 - RNA, 125 nt, synthetic construct
  source 1..125: mol_type = other RNA
gctctttgtgttcattgcccgttttagagctagaaatagcaagttaaaataaggctagtccgttatcaacttgaaaaagtggcaccgagtcggtgcaccggccgagggcaatgaacacttttttt

SEQ ID NO: 1350 - RNA, 125 nt, synthetic construct
  source 1..125: mol_type = other RNA
gctctttgtgttcattgcccgttttagagctagaaatagcaagttaaaataaggctagtccgttatcaacttgaaaaagtggcaccgagtcggtgctccagccaccggccgagggcaatgaacac

SEQ ID NO: 1351 - RNA, 125 nt, synthetic construct
  source 1..125: mol_type = other RNA
gctctttgtgttcattgcccgttttagagctagaaatagcaagttaaaataaggctagtccgttatcaacttgaaaaagtggcaccgagtcggtgcaccggccaagggcaatgaacacttttttt

SEQ ID NO: 1352 - RNA, 125 nt, synthetic construct
  source 1..125: mol_type = other RNA
gctctttgtgttcattgcccgttttagagctagaaatagcaagttaaaataaggctagtccgttatcaacttgaaaaagtggcaccgagtcggtgctccagccaccggcccagggcaatgaacac

SEQ ID NO: 1353 - RNA, 125 nt, synthetic construct
  source 1..125: mol_type = other RNA
gctctttgtgttcattgcccgttttagagctagaaatagcaagttaaaataaggctagtccgttatcaacttgaaaaagtggcaccgagtcggtgcttccagccaccggccgagggcaatgaaca

SEQ ID NO: 1354 - RNA, 125 nt, synthetic construct
  source 1..125: mol_type = other RNA
gctctttgtgttcattgcccgttttagagctagaaatagcaagttaaaataaggctagtccgttatcaacttgaaaaagtggcaccgagtcggtgcagccaccggccgagggcaatgaacacaaa

SEQ ID NO: 1355 - RNA, 125 nt, synthetic construct
  source 1..125: mol_type = other RNA
gctctttgtgttcattgcccgttttagagctagaaatagcaagttaaaataaggctagtccgttatcaacttgaaaaagtggcaccgagtcggtgcttccagccaccggcccagggcaatgaaca

SEQ ID NO: 1356 - RNA, 125 nt, synthetic construct
  source 1..125: mol_type = other RNA
gctctttgtgttcattgcccgttttagagctagaaatagcaagttaaaataaggctagtccgttatcaacttgaaaaagtggcaccgagtcggtgcttccagccaccggcctagggcaatgaaca

SEQ ID NO: 1357 - RNA, 126 nt, synthetic construct
  source 1..126: mol_type = other RNA
gctctttgtgttcattgcccgttttagagctagaaatagcaagttaaaataaggctagtccgttatcaacttgaaaaagtggcaccgagtcggtgcagccaccggccaagggcaatgaacacaaag

SEQ ID NO: 1358 - RNA, 126 nt, synthetic construct
  source 1..126: mol_type = other RNA
gctctttgtgttcattgcccgttttagagctagaaatagcaagttaaaataaggctagtccgttatcaacttgaaaaagtggcaccgagtcggtgcttccagccaccggcctagggcaatgaacac

SEQ ID NO: 1359 - RNA, 126 nt, synthetic construct
  source 1..126: mol_type = other RNA
gctctttgtgttcattgcccgttttagagctagaaatagcaagttaaaataaggctagtccgttatcaacttgaaaaagtggcaccgagtcggtgctccagccaccggcctagggcaatgaacaca

SEQ ID NO: 1360 - RNA, 126 nt, synthetic construct
  source 1..126: mol_type = other RNA
gctctttgtgttcattgcccgttttagagctagaaatagcaagttaaaataaggctagtccgttatcaacttgaaaaagtggcaccgagtcggtgcttccagccaccggccaagggcaatgaacac

SEQ ID NO: 1361 - RNA, 126 nt, synthetic construct
  source 1..126: mol_type = other RNA
gctctttgtgttcattgcccgttttagagctagaaatagcaagttaaaataaggctagtccgttatcaacttgaaaaagtggcaccgagtcggtgcttccagccaccggcccagggcaatgaacac

SEQ ID NO: 1362 - RNA, 126 nt, synthetic construct
  source 1..126: mol_type = other RNA
gctctttgtgttcattgcccgttttagagctagaaatagcaagttaaaataaggctagtccgttatcaacttgaaaaagtggcaccgagtcggtgctccagccaccggccgagggcaatgaacaca

SEQ ID NO: 1363 - RNA, 126 nt, synthetic construct
  source 1..126: mol_type = other RNA
gctctttgtgttcattgcccgttttagagctagaaatagcaagttaaaataaggctagtccgttatcaacttgaaaaagtggcaccgagtcggtgcagccaccggcctagggcaatgaacacaaag

SEQ ID NO: 1364 - RNA, 126 nt, synthetic construct
  source 1..126: mol_type = other RNA
gctctttgtgttcattgcccgttttagagctagaaatagcaagttaaaataaggctagtccgttatcaacttgaaaaagtggcaccgagtcggtgctccagccaccggccaagggcaatgaacaca

SEQ ID NO: 1365 - RNA, 126 nt, synthetic construct
  source 1..126: mol_type = other RNA
gctctttgtgttcattgcccgttttagagctagaaatagcaagttaaaataaggctagtccgttatcaacttgaaaaagtggcaccgagtcggtgcagccaccggcccagggcaatgaacacaaag

SEQ ID NO: 1366 - RNA, 126 nt, synthetic construct
  source 1..126: mol_type = other RNA
gctctttgtgttcattgcccgttttagagctagaaatagcaagttaaaataaggctagtccgttatcaacttgaaaaagtggcaccgagtcggtgcttccagccaccggccgagggcaatgaacac

SEQ ID NO: 1367 - RNA, 126 nt, synthetic construct
  source 1..126: mol_type = other RNA
gctctttgtgttcattgcccgttttagagctagaaatagcaagttaaaataaggctagtccgttatcaacttgaaaaagtggcaccgagtcggtgctccagccaccggcccagggcaatgaacaca

SEQ ID NO: 1368 - RNA, 126 nt, synthetic construct
  source 1..126: mol_type = other RNA
gctctttgtgttcattgcccgttttagagctagaaatagcaagttaaaataaggctagtccgttatcaacttgaaaaagtggcaccgagtcggtgcgccaccggccaagggcaatgaacttttttt

SEQ ID NO: 1369 - RNA, 126 nt, synthetic construct
  source 1..126: mol_type = other RNA
gctctttgtgttcattgcccgttttagagctagaaatagcaagttaaaataaggctagtccgttatcaacttgaaaaagtggcaccgagtcggtgcaccggccgagggcaatgaacacattttttt

SEQ ID NO: 1370 - RNA, 126 nt, synthetic construct
  source 1..126: mol_type = other RNA
gctctttgtgttcattgcccgttttagagctagaaatagcaagttaaaataaggctagtccgttatcaacttgaaaaagtggcaccgagtcggtgcgccaccggcctagggcaatgaacttttttt

SEQ ID NO: 1371 - RNA, 126 nt, synthetic construct
  source 1..126: mol_type = other RNA
gctctttgtgttcattgcccgttttagagctagaaatagcaagttaaaataaggctagtccgttatcaacttgaaaaagtggcaccgagtcggtgcgccaccggcccagggcaatgaacttttttt

SEQ ID NO: 1372 - RNA, 126 nt, synthetic construct
  source 1..126: mol_type = other RNA
gctctttgtgttcattgcccgttttagagctagaaatagcaagttaaaataaggctagtccgttatcaacttgaaaaagtggcaccgagtcggtgcgccaccggccgagggcaatgaacttttttt

SEQ ID NO: 1373 - RNA, 126 nt, synthetic construct
  source 1..126: mol_type = other RNA
gctctttgtgttcattgcccgttttagagctagaaatagcaagttaaaataaggctagtccgttatcaacttgaaaaagtggcaccgagtcggtgcaccggcctagggcaatgaacacattttttt

SEQ ID NO: 1374 - RNA, 126 nt, synthetic construct
  source 1..126: mol_type = other RNA
gctctttgtgttcattgcccgttttagagctagaaatagcaagttaaaataaggctagtccgttatcaacttgaaaaagtggcaccgagtcggtgcaccggcccagggcaatgaacacattttttt

SEQ ID NO: 1375 - RNA, 126 nt, synthetic construct
  source 1..126: mol_type = other RNA
gctctttgtgttcattgcccgttttagagctagaaatagcaagttaaaataaggctagtccgttatcaacttgaaaaagtggcaccgagtcggtgcaccggccaagggcaatgaacacattttttt

SEQ ID NO: 1376 - RNA, 126 nt, synthetic construct
  source 1..126: mol_type = other RNA
gctctttgtgttcattgcccgttttagagctagaaatagcaagttaaaataaggctagtccgttatcaacttgaaaaagtggcaccgagtcggtgcagccaccggccgagggcaatgaacacaaag

SEQ ID NO: 1377 - RNA, 127 nt, synthetic construct
  source 1..127: mol_type = other RNA
gctctttgtgttcattgcccgttttagagctagaaatagcaagttaaaataaggctagtccgttatcaacttgaaaaagtggcaccgagtcggtgctccagccaccggcctagggcaatgaacacaa

SEQ ID NO: 1378 - RNA, 127 nt, synthetic construct
  source 1..127: mol_type = other RNA
gctctttgtgttcattgcccgttttagagctagaaatagcaagttaaaataaggctagtccgttatcaacttgaaaaagtggcaccgagtcggtgcgccaccggccgagggcaatgaacattttttt

SEQ ID NO: 1379 - RNA, 127 nt, synthetic construct
  source 1..127: mol_type = other RNA
gctctttgtgttcattgcccgttttagagctagaaatagcaagttaaaataaggctagtccgttatcaacttgaaaaagtggcaccgagtcggtgcaccggccaagggcaatgaacacaattttttt

SEQ ID NO: 1380 - RNA, 127 nt, synthetic construct
  source 1..127: mol_type = other RNA
gctctttgtgttcattgcccgttttagagctagaaatagcaagttaaaataaggctagtccgttatcaacttgaaaaagtggcaccgagtcggtgcgccaccggcctagggcaatgaacattttttt

SEQ ID NO: 1381 - RNA, 127 nt, synthetic construct
  source 1..127: mol_type = other RNA
gctctttgtgttcattgcccgttttagagctagaaatagcaagttaaaataaggctagtccgttatcaacttgaaaaagtggcaccgagtcggtgcagccaccggcctagggcaatgaacttttttt

SEQ ID NO: 1382 - RNA, 127 nt, synthetic construct
  source 1..127: mol_type = other RNA
gctctttgtgttcattgcccgttttagagctagaaatagcaagttaaaataaggctagtccgttatcaacttgaaaaagtggcaccgagtcggtgcgccaccggccaagggcaatgaacattttttt

SEQ ID NO: 1383 - RNA, 127 nt, synthetic construct
  source 1..127: mol_type = other RNA
gctctttgtgttcattgcccgttttagagctagaaatagcaagttaaaataaggctagtccgttatcaacttgaaaaagtggcaccgagtcggtgcttccagccaccggccaagggcaatgaacaca

SEQ ID NO: 1384 - RNA, 127 nt, synthetic construct
  source 1..127: mol_type = other RNA
gctctttgtgttcattgcccgttttagagctagaaatagcaagttaaaataaggctagtccgttatcaacttgaaaaagtggcaccgagtcggtgcgccaccggcccagggcaatgaacattttttt

SEQ ID NO: 1385 - RNA, 127 nt, synthetic construct
  source 1..127: mol_type = other RNA
gctctttgtgttcattgcccgttttagagctagaaatagcaagttaaaataaggctagtccgttatcaacttgaaaaagtggcaccgagtcggtgcagccaccggccgagggcaatgaacttttttt

SEQ ID NO: 1386 - RNA, 127 nt, synthetic construct
  source 1..127: mol_type = other RNA
gctctttgtgttcattgcccgttttagagctagaaatagcaagttaaaataaggctagtccgttatcaacttgaaaaagtggcaccgagtcggtgcaccggcctagggcaatgaacacaattttttt

SEQ ID NO: 1387 - RNA, 127 nt, synthetic construct
  source 1..127: mol_type = other RNA
gctctttgtgttcattgcccgttttagagctagaaatagcaagttaaaataaggctagtccgttatcaacttgaaaaagtggcaccgagtcggtgcagccaccggcccagggcaatgaacttttttt

SEQ ID NO: 1388 - RNA, 127 nt, synthetic construct
  source 1..127: mol_type = other RNA
gctctttgtgttcattgcccgttttagagctagaaatagcaagttaaaataaggctagtccgttatcaacttgaaaaagtggcaccgagtcggtgctccagccaccggccaagggcaatgaacacaa

SEQ ID NO: 1389 - RNA, 127 nt, synthetic construct
  source 1..127: mol_type = other RNA
gctctttgtgttcattgcccgttttagagctagaaatagcaagttaaaataaggctagtccgttatcaacttgaaaaagtggcaccgagtcggtgcaccggccgagggcaatgaacacaattttttt

SEQ ID NO: 1390 - RNA, 127 nt, synthetic construct
  source 1..127: mol_type = other RNA
gctctttgtgttcattgcccgttttagagctagaaatagcaagttaaaataaggctagtccgttatcaacttgaaaaagtggcaccgagtcggtgcttccagccaccggcccagggcaatgaacaca

SEQ ID NO: 1391 - RNA, 127 nt, synthetic construct
  source 1..127: mol_type = other RNA
gctctttgtgttcattgcccgttttagagctagaaatagcaagttaaaataaggctagtccgttatcaacttgaaaaagtggcaccgagtcggtgcagccaccggccaagggcaatgaacttttttt

SEQ ID NO: 1392 - RNA, 127 nt, synthetic construct
  source 1..127: mol_type = other RNA
gctctttgtgttcattgcccgttttagagctagaaatagcaagttaaaataaggctagtccgttatcaacttgaaaaagtggcaccgagtcggtgcaccggcccagggcaatgaacacaattttttt

SEQ ID NO: 1393 - RNA, 127 nt, synthetic construct
  source 1..127: mol_type = other RNA
gctctttgtgttcattgcccgttttagagctagaaatagcaagttaaaataaggctagtccgttatcaacttgaaaaagtggcaccgagtcggtgcttccagccaccggccgagggcaatgaacaca

SEQ ID NO: 1394 - RNA, 127 nt, synthetic construct
  source 1..127: mol_type = other RNA
gctctttgtgttcattgcccgttttagagctagaaatagcaagttaaaataaggctagtccgttatcaacttgaaaaagtggcaccgagtcggtgctccagccaccggcccagggcaatgaacacaa

SEQ ID NO: 1395 - RNA, 127 nt, synthetic construct
  source 1..127: mol_type = other RNA
gctctttgtgttcattgcccgttttagagctagaaatagcaagttaaaataaggctagtccgttatcaacttgaaaaagtggcaccgagtcggtgcttccagccaccggcctagggcaatgaacaca

SEQ ID NO: 1396 - RNA, 127 nt, synthetic construct
  source 1..127: mol_type = other RNA
gctctttgtgttcattgcccgttttagagctagaaatagcaagttaaaataaggctagtccgttatcaacttgaaaaagtggcaccgagtcggtgctccagccaccggccgagggcaatgaacacaa

SEQ ID NO: 1397 - RNA, 128 nt, synthetic construct
  source 1..128: mol_type = other RNA
gctctttgtgttcattgcccgttttagagctagaaatagcaagttaaaataaggctagtccgttatcaacttgaaaaagtggcaccgagtcggtgcttccagccaccggccaagggcaatgaacacaa

SEQ ID NO: 1398 - RNA, 128 nt, synthetic construct
  source 1..128: mol_type = other RNA
gctctttgtgttcattgcccgttttagagctagaaatagcaagttaaaataaggctagtccgttatcaacttgaaaaagtggcaccgagtcggtgcgccaccggccgagggcaatgaacacttttttt

SEQ ID NO: 1399 - RNA, 128 nt, synthetic construct
  source 1..128: mol_type = other RNA
gctctttgtgttcattgcccgttttagagctagaaatagcaagttaaaataaggctagtccgttatcaacttgaaaaagtggcaccgagtcggtgcttccagccaccggcctagggcaatgaacacaa

SEQ ID NO: 1400 - RNA, 128 nt, synthetic construct
  source 1..128: mol_type = other RNA
gctctttgtgttcattgcccgttttagagctagaaatagcaagttaaaataaggctagtccgttatcaacttgaaaaagtggcaccgagtcggtgctccagccaccggccaagggcaatgaacacaaa

SEQ ID NO: 1401 - RNA, 128 nt, synthetic construct
  source 1..128: mol_type = other RNA
gctctttgtgttcattgcccgttttagagctagaaatagcaagttaaaataaggctagtccgttatcaacttgaaaaagtggcaccgagtcggtgcgccaccggcccagggcaatgaacacttttttt

SEQ ID NO: 1402 - RNA, 128 nt, synthetic construct
  source 1..128: mol_type = other RNA
gctctttgtgttcattgcccgttttagagctagaaatagcaagttaaaataaggctagtccgttatcaacttgaaaaagtggcaccgagtcggtgcagccaccggccgagggcaatgaacattttttt

SEQ ID NO: 1403 - RNA, 128 nt, synthetic construct
  source 1..128: mol_type = other RNA
gctctttgtgttcattgcccgttttagagctagaaatagcaagttaaaataaggctagtccgttatcaacttgaaaaagtggcaccgagtcggtgcaccggccgagggcaatgaacacaaattttttt

SEQ ID NO: 1404 - RNA, 128 nt, synthetic construct
  source 1..128: mol_type = other RNA
gctctttgtgttcattgcccgttttagagctagaaatagcaagttaaaataaggctagtccgttatcaacttgaaaaagtggcaccgagtcggtgcaccggcccagggcaatgaacacaaattttttt

SEQ ID NO: 1405 - RNA, 128 nt, synthetic construct
  source 1..128: mol_type = other RNA
gctctttgtgttcattgcccgttttagagctagaaatagcaagttaaaataaggctagtccgttatcaacttgaaaaagtggcaccgagtcggtgcgccaccggccaagggcaatgaacacttttttt

SEQ ID NO: 1406 - RNA, 128 nt, synthetic construct
  source 1..128: mol_type = other RNA
gctctttgtgttcattgcccgttttagagctagaaatagcaagttaaaataaggctagtccgttatcaacttgaaaaagtggcaccgagtcggtgcagccaccggcctagggcaatgaacattttttt

SEQ ID NO: 1407 - RNA, 128 nt, synthetic construct
  source 1..128: mol_type = other RNA
gctctttgtgttcattgcccgttttagagctagaaatagcaagttaaaataaggctagtccgttatcaacttgaaaaagtggcaccgagtcggtgctccagccaccggccgagggcaatgaacacaaa

SEQ ID NO: 1408 - RNA, 128 nt, synthetic construct
  source 1..128: mol_type = other RNA
gctctttgtgttcattgcccgttttagagctagaaatagcaagttaaaataaggctagtccgttatcaacttgaaaaagtggcaccgagtcggtgcagccaccggcccagggcaatgaacattttttt

SEQ ID NO: 1409 - RNA, 128 nt, synthetic construct
  source 1..128: mol_type = other RNA
gctctttgtgttcattgcccgttttagagctagaaatagcaagttaaaataaggctagtccgttatcaacttgaaaaagtggcaccgagtcggtgcaccggccaagggcaatgaacacaaattttttt

SEQ ID NO: 1410 - RNA, 128 nt, synthetic construct
  source 1..128: mol_type = other RNA
gctctttgtgttcattgcccgttttagagctagaaatagcaagttaaaataaggctagtccgttatcaacttgaaaaagtggcaccgagtcggtgcgccaccggcctagggcaatgaacacttttttt

SEQ ID NO: 1411 - RNA, 128 nt, synthetic construct
  source 1..128: mol_type = other RNA
gctctttgtgttcattgcccgttttagagctagaaatagcaagttaaaataaggctagtccgttatcaacttgaaaaagtggcaccgagtcggtgctccagccaccggcccagggcaatgaacacaaa

SEQ ID NO: 1412 - RNA, 128 nt, synthetic construct
  source 1..128: mol_type = other RNA
gctctttgtgttcattgcccgttttagagctagaaatagcaagttaaaataaggctagtccgttatcaacttgaaaaagtggcaccgagtcggtgcttccagccaccggcccagggcaatgaacacaa

SEQ ID NO: 1413 - RNA, 128 nt, synthetic construct
  source 1..128: mol_type = other RNA
gctctttgtgttcattgcccgttttagagctagaaatagcaagttaaaataaggctagtccgttatcaacttgaaaaagtggcaccgagtcggtgcaccggcctagggcaatgaacacaaattttttt

SEQ ID NO: 1414 - RNA, 128 nt, synthetic construct
  source 1..128: mol_type = other RNA
gctctttgtgttcattgcccgttttagagctagaaatagcaagttaaaataaggctagtccgttatcaacttgaaaaagtggcaccgagtcggtgctccagccaccggcctagggcaatgaacacaaa

SEQ ID NO: 1415 - RNA, 128 nt, synthetic construct
  source 1..128: mol_type = other RNA
gctctttgtgttcattgcccgttttagagctagaaatagcaagttaaaataaggctagtccgttatcaacttgaaaaagtggcaccgagtcggtgcttccagccaccggccgagggcaatgaacacaa

SEQ ID NO: 1416 - RNA, 128 nt, synthetic construct
  source 1..128: mol_type = other RNA
gctctttgtgttcattgcccgttttagagctagaaatagcaagttaaaataaggctagtccgttatcaacttgaaaaagtggcaccgagtcggtgcagccaccggccaagggcaatgaacattttttt

SEQ ID NO: 1417 - RNA, 129 nt, synthetic construct
  source 1..129: mol_type = other RNA
gctctttgtgttcattgcccgttttagagctagaaatagcaagttaaaataaggctagtccgttatcaacttgaaaaagtggcaccgagtcggtgcaccggccaagggcaatgaacacaaagttttttt

SEQ ID NO: 1418 - RNA, 129 nt, synthetic construct
  source 1..129: mol_type = other RNA
gctctttgtgttcattgcccgttttagagctagaaatagcaagttaaaataaggctagtccgttatcaacttgaaaaagtggcaccgagtcggtgcagccaccggcccagggcaatgaacacttttttt

SEQ ID NO: 1419 - RNA, 129 nt, synthetic construct
  source 1..129: mol_type = other RNA
gctctttgtgttcattgcccgttttagagctagaaatagcaagttaaaataaggctagtccgttatcaacttgaaaaagtggcaccgagtcggtgcaccggcctagggcaatgaacacaaagttttttt

SEQ ID NO: 1420 - RNA, 129 nt, synthetic construct
  source 1..129: mol_type = other RNA
gctctttgtgttcattgcccgttttagagctagaaatagcaagttaaaataaggctagtccgttatcaacttgaaaaagtggcaccgagtcggtgcaccggcccagggcaatgaacacaaagttttttt

SEQ ID NO: 1421 - RNA, 129 nt, synthetic construct
  source 1..129: mol_type = other RNA
gctctttgtgttcattgcccgttttagagctagaaatagcaagttaaaataaggctagtccgttatcaacttgaaaaagtggcaccgagtcggtgctccagccaccggccgagggcaatgaacacaaag

SEQ ID NO: 1422 - RNA, 129 nt, synthetic construct
  source 1..129: mol_type = other RNA
gctctttgtgttcattgcccgttttagagctagaaatagcaagttaaaataaggctagtccgttatcaacttgaaaaagtggcaccgagtcggtgcttccagccaccggccaagggcaatgaacacaaa

SEQ ID NO: 1423 - RNA, 129 nt, synthetic construct
  source 1..129: mol_type = other RNA
gctctttgtgttcattgcccgttttagagctagaaatagcaagttaaaataaggctagtccgttatcaacttgaaaaagtggcaccgagtcggtgcagccaccggccaagggcaatgaacacttttttt

SEQ ID NO: 1424 - RNA, 129 nt, synthetic construct
  source 1..129: mol_type = other RNA
gctctttgtgttcattgcccgttttagagctagaaatagcaagttaaaataaggctagtccgttatcaacttgaaaaagtggcaccgagtcggtgctccagccaccggcctagggcaatgaacacaaag

SEQ ID NO: 1425 - RNA, 129 nt, synthetic construct
  source 1..129: mol_type = other RNA
gctctttgtgttcattgcccgttttagagctagaaatagcaagttaaaataaggctagtccgttatcaacttgaaaaagtggcaccgagtcggtgctccagccaccggcccagggcaatgaacacaaag

SEQ ID NO: 1426 - RNA, 129 nt, synthetic construct
  source 1..129: mol_type = other RNA
gctctttgtgttcattgcccgttttagagctagaaatagcaagttaaaataaggctagtccgttatcaacttgaaaaagtggcaccgagtcggtgcttccagccaccggcctagggcaatgaacacaaa

SEQ ID NO: 1427 - RNA, 129 nt, synthetic construct
  source 1..129: mol_type = other RNA
gctctttgtgttcattgcccgttttagagctagaaatagcaagttaaaataaggctagtccgttatcaacttgaaaaagtggcaccgagtcggtgcttccagccaccggccgagggcaatgaacacaaa

SEQ ID NO: 1428 - RNA, 129 nt, synthetic construct
  source 1..129: mol_type = other RNA
gctctttgtgttcattgcccgttttagagctagaaatagcaagttaaaataaggctagtccgttatcaacttgaaaaagtggcaccgagtcggtgcagccaccggccgagggcaatgaacacttttttt

SEQ ID NO: 1429 - RNA, 129 nt, synthetic construct
  source 1..129: mol_type = other RNA
gctctttgtgttcattgcccgttttagagctagaaatagcaagttaaaataaggctagtccgttatcaacttgaaaaagtggcaccgagtcggtgcgccaccggcccagggcaatgaacacattttttt

SEQ ID NO: 1430 - RNA, 129 nt, synthetic construct
  source 1..129: mol_type = other RNA
gctctttgtgttcattgcccgttttagagctagaaatagcaagttaaaataaggctagtccgttatcaacttgaaaaagtggcaccgagtcggtgcgccaccggccaagggcaatgaacacattttttt

SEQ ID NO: 1431 - RNA, 129 nt, synthetic construct
  source 1..129: mol_type = other RNA
gctctttgtgttcattgcccgttttagagctagaaatagcaagttaaaataaggctagtccgttatcaacttgaaaaagtggcaccgagtcggtgcgccaccggcctagggcaatgaacacattttttt

SEQ ID NO: 1432 - RNA, 129 nt, synthetic construct
  source 1..129: mol_type = other RNA
gctctttgtgttcattgcccgttttagagctagaaatagcaagttaaaataaggctagtccgttatcaacttgaaaaagtggcaccgagtcggtgcagccaccggcctagggcaatgaacacttttttt

SEQ ID NO: 1433 - RNA, 129 nt, synthetic construct
  source 1..129: mol_type = other RNA
gctctttgtgttcattgcccgttttagagctagaaatagcaagttaaaataaggctagtccgttatcaacttgaaaaagtggcaccgagtcggtgctccagccaccggccaagggcaatgaacacaaag

SEQ ID NO: 1434 - RNA, 129 nt, synthetic construct
  source 1..129: mol_type = other RNA
gctctttgtgttcattgcccgttttagagctagaaatagcaagttaaaataaggctagtccgttatcaacttgaaaaagtggcaccgagtcggtgcaccggccgagggcaatgaacacaaagttttttt

SEQ ID NO: 1435 - RNA, 129 nt, synthetic construct
  source 1..129: mol_type = other RNA
gctctttgtgttcattgcccgttttagagctagaaatagcaagttaaaataaggctagtccgttatcaacttgaaaaagtggcaccgagtcggtgcttccagccaccggcccagggcaatgaacacaaa

SEQ ID NO: 1436 - RNA, 129 nt, synthetic construct
  source 1..129: mol_type = other RNA
gctctttgtgttcattgcccgttttagagctagaaatagcaagttaaaataaggctagtccgttatcaacttgaaaaagtggcaccgagtcggtgcgccaccggccgagggcaatgaacacattttttt

SEQ ID NO: 1437 - RNA, 130 nt, synthetic construct
  source 1..130: mol_type = other RNA
gctctttgtgttcattgcccgttttagagctagaaatagcaagttaaaataaggctagtccgttatcaacttgaaaaagtggcaccgagtcggtgcagccaccggccaagggcaatgaacacattttttt

SEQ ID NO: 1438 - RNA, 130 nt, synthetic construct
  source 1..130: mol_type = other RNA
gctctttgtgttcattgcccgttttagagctagaaatagcaagttaaaataaggctagtccgttatcaacttgaaaaagtggcaccgagtcggtgcagccaccggcctagggcaatgaacacattttttt

SEQ ID NO: 1439 - RNA, 130 nt, synthetic construct
  source 1..130: mol_type = other RNA
gctctttgtgttcattgcccgttttagagctagaaatagcaagttaaaataaggctagtccgttatcaacttgaaaaagtggcaccgagtcggtgctccagccaccggccgagggcaatgaacttttttt

SEQ ID NO: 1440 - RNA, 130 nt, synthetic construct
  source 1..130: mol_type = other RNA
gctctttgtgttcattgcccgttttagagctagaaatagcaagttaaaataaggctagtccgttatcaacttgaaaaagtggcaccgagtcggtgcttccagccaccggcctagggcaatgaacacaaag

SEQ ID NO: 1441 - RNA, 130 nt, synthetic construct
  source 1..130: mol_type = other RNA
gctctttgtgttcattgcccgttttagagctagaaatagcaagttaaaataaggctagtccgttatcaacttgaaaaagtggcaccgagtcggtgcgccaccggcctagggcaatgaacacaattttttt

SEQ ID NO: 1442 - RNA, 130 nt, synthetic construct
  source 1..130: mol_type = other RNA
gctctttgtgttcattgcccgttttagagctagaaatagcaagttaaaataaggctagtccgttatcaacttgaaaaagtggcaccgagtcggtgctccagccaccggcccagggcaatgaacttttttt

SEQ ID NO: 1443 - RNA, 130 nt, synthetic construct
  source 1..130: mol_type = other RNA
gctctttgtgttcattgcccgttttagagctagaaatagcaagttaaaataaggctagtccgttatcaacttgaaaaagtggcaccgagtcggtgcgccaccggccgagggcaatgaacacaattttttt

SEQ ID NO: 1444 - RNA, 130 nt, synthetic construct
  source 1..130: mol_type = other RNA
gctctttgtgttcattgcccgttttagagctagaaatagcaagttaaaataaggctagtccgttatcaacttgaaaaagtggcaccgagtcggtgcagccaccggcccagggcaatgaacacattttttt

SEQ ID NO: 1445 - RNA, 130 nt, synthetic construct
  source 1..130: mol_type = other RNA
gctctttgtgttcattgcccgttttagagctagaaatagcaagttaaaataaggctagtccgttatcaacttgaaaaagtggcaccgagtcggtgctccagccaccggccaagggcaatgaacttttttt

SEQ ID NO: 1446 - RNA, 130 nt, synthetic construct
  source 1..130: mol_type = other RNA
gctctttgtgttcattgcccgttttagagctagaaatagcaagttaaaataaggctagtccgttatcaacttgaaaaagtggcaccgagtcggtgcttccagccaccggcccagggcaatgaacacaaag

SEQ ID NO: 1447 - RNA, 130 nt, synthetic construct
  source 1..130: mol_type = other RNA
gctctttgtgttcattgcccgttttagagctagaaatagcaagttaaaataaggctagtccgttatcaacttgaaaaagtggcaccgagtcggtgcttccagccaccggccaagggcaatgaacacaaag

SEQ ID NO: 1448 - RNA, 130 nt, synthetic construct
  source 1..130: mol_type = other RNA
gctctttgtgttcattgcccgttttagagctagaaatagcaagttaaaataaggctagtccgttatcaacttgaaaaagtggcaccgagtcggtgctccagccaccggcctagggcaatgaacttttttt

SEQ ID NO: 1449 - RNA, 130 nt, synthetic construct
  source 1..130: mol_type = other RNA
gctctttgtgttcattgcccgttttagagctagaaatagcaagttaaaataaggctagtccgttatcaacttgaaaaagtggcaccgagtcggtgcagccaccggccgagggcaatgaacacattttttt

SEQ ID NO: 1450 - RNA, 130 nt, synthetic construct
  source 1..130: mol_type = other RNA
gctctttgtgttcattgcccgttttagagctagaaatagcaagttaaaataaggctagtccgttatcaacttgaaaaagtggcaccgagtcggtgcttccagccaccggccgagggcaatgaacacaaag

SEQ ID NO: 1451 - RNA, 130 nt, synthetic construct
  source 1..130: mol_type = other RNA
gctctttgtgttcattgcccgttttagagctagaaatagcaagttaaaataaggctagtccgttatcaacttgaaaaagtggcaccgagtcggtgcgccaccggcccagggcaatgaacacaattttttt

SEQ ID NO: 1452 - RNA, 130 nt, synthetic construct
  source 1..130: mol_type = other RNA
gctctttgtgttcattgcccgttttagagctagaaatagcaagttaaaataaggctagtccgttatcaacttgaaaaagtggcaccgagtcggtgcgccaccggccaagggcaatgaacacaattttttt

SEQ ID NO: 1453 - RNA, 131 nt, synthetic construct
  source 1..131: mol_type = other RNA
gctctttgtgttcattgcccgttttagagctagaaatagcaagttaaaataaggctagtccgttatcaacttgaaaaagtggcaccgagtcggtgctccagccaccggccgagggcaatgaacattttttt

SEQ ID NO: 1454 - RNA, 131 nt, synthetic construct
  source 1..131: mol_type = other RNA
gctctttgtgttcattgcccgttttagagctagaaatagcaagttaaaataaggctagtccgttatcaacttgaaaaagtggcaccgagtcggtgcttccagccaccggcccagggcaatgaacttttttt

SEQ ID NO: 1455 - RNA, 131 nt, synthetic construct
  source 1..131: mol_type = other RNA
gctctttgtgttcattgcccgttttagagctagaaatagcaagttaaaataaggctagtccgttatcaacttgaaaaagtggcaccgagtcggtgcttccagccaccggccgagggcaatgaacttttttt

SEQ ID NO: 1456 - RNA, 131 nt, synthetic construct
  source 1..131: mol_type = other RNA
gctctttgtgttcattgcccgttttagagctagaaatagcaagttaaaataaggctagtccgttatcaacttgaaaaagtggcaccgagtcggtgcttccagccaccggcctagggcaatgaacttttttt

SEQ ID NO: 1457 - RNA, 131 nt, synthetic construct
  source 1..131: mol_type = other RNA
gctctttgtgttcattgcccgttttagagctagaaatagcaagttaaaataaggctagtccgttatcaacttgaaaaagtggcaccgagtcggtgctccagccaccggcccagggcaatgaacattttttt

SEQ ID NO: 1458 - RNA, 131 nt, synthetic construct
  source 1..131: mol_type = other RNA
gctctttgtgttcattgcccgttttagagctagaaatagcaagttaaaataaggctagtccgttatcaacttgaaaaagtggcaccgagtcggtgctccagccaccggccaagggcaatgaacattttttt

SEQ ID NO: 1459 - RNA, 131 nt, synthetic construct
  source 1..131: mol_type = other RNA
gctctttgtgttcattgcccgttttagagctagaaatagcaagttaaaataaggctagtccgttatcaacttgaaaaagtggcaccgagtcggtgcgccaccggcctagggcaatgaacacaaattttttt

SEQ ID NO: 1460 - RNA, 131 nt, synthetic construct
  source 1..131: mol_type = other RNA
gctctttgtgttcattgcccgttttagagctagaaatagcaagttaaaataaggctagtccgttatcaacttgaaaaagtggcaccgagtcggtgcgccaccggccgagggcaatgaacacaaattttttt

SEQ ID NO: 1461 - RNA, 131 nt, synthetic construct
  source 1..131: mol_type = other RNA
gctctttgtgttcattgcccgttttagagctagaaatagcaagttaaaataaggctagtccgttatcaacttgaaaaagtggcaccgagtcggtgcagccaccggcctagggcaatgaacacaattttttt

SEQ ID NO: 1462 - RNA, 131 nt, synthetic construct
  source 1..131: mol_type = other RNA
gctctttgtgttcattgcccgttttagagctagaaatagcaagttaaaataaggctagtccgttatcaacttgaaaaagtggcaccgagtcggtgcgccaccggccaagggcaatgaacacaaattttttt

SEQ ID NO: 1463 - RNA, 131 nt, synthetic construct
  source 1..131: mol_type = other RNA
gctctttgtgttcattgcccgttttagagctagaaatagcaagttaaaataaggctagtccgttatcaacttgaaaaagtggcaccgagtcggtgcagccaccggccaagggcaatgaacacaattttttt

SEQ ID NO: 1464 - RNA, 131 nt, synthetic construct
  source 1..131: mol_type = other RNA
gctctttgtgttcattgcccgttttagagctagaaatagcaagttaaaataaggctagtccgttatcaacttgaaaaagtggcaccgagtcggtgcagccaccggccgagggcaatgaacacaattttttt

SEQ ID NO: 1465 - RNA, 131 nt, synthetic construct
  source 1..131: mol_type = other RNA
gctctttgtgttcattgcccgttttagagctagaaatagcaagttaaaataaggctagtccgttatcaacttgaaaaagtggcaccgagtcggtgctccagccaccggcctagggcaatgaacattttttt

SEQ ID NO: 1466 - RNA, 131 nt, synthetic construct
  source 1..131: mol_type = other RNA
gctctttgtgttcattgcccgttttagagctagaaatagcaagttaaaataaggctagtccgttatcaacttgaaaaagtggcaccgagtcggtgcttccagccaccggccaagggcaatgaacttttttt

SEQ ID NO: 1467 - RNA, 131 nt, synthetic construct
  source 1..131: mol_type = other RNA
gctctttgtgttcattgcccgttttagagctagaaatagcaagttaaaataaggctagtccgttatcaacttgaaaaagtggcaccgagtcggtgcgccaccggcccagggcaatgaacacaaattttttt

SEQ ID NO: 1468 - RNA, 131 nt, synthetic construct
  source 1..131: mol_type = other RNA
gctctttgtgttcattgcccgttttagagctagaaatagcaagttaaaataaggctagtccgttatcaacttgaaaaagtggcaccgagtcggtgcagccaccggcccagggcaatgaacacaattttttt

SEQ ID NO: 1469 - RNA, 132 nt, synthetic construct
  source 1..132: mol_type = other RNA
gctctttgtgttcattgcccgttttagagctagaaatagcaagttaaaataaggctagtccgttatcaacttgaaaaagtggcaccgagtcggtgcgccaccggccgagggcaatgaacacaaagttttttt

SEQ ID NO: 1470 - RNA, 132 nt, synthetic construct
  source 1..132: mol_type = other RNA
gctctttgtgttcattgcccgttttagagctagaaatagcaagttaaaataaggctagtccgttatcaacttgaaaaagtggcaccgagtcggtgcgccaccggccaagggcaatgaacacaaagttttttt

SEQ ID NO: 1471 - RNA, 132 nt, synthetic construct
  source 1..132: mol_type = other RNA
gctctttgtgttcattgcccgttttagagctagaaatagcaagttaaaataaggctagtccgttatcaacttgaaaaagtggcaccgagtcggtgctccagccaccggcccagggcaatgaacacttttttt

SEQ ID NO: 1472 - RNA, 132 nt, synthetic construct
  source 1..132: mol_type = other RNA
gctctttgtgttcattgcccgttttagagctagaaatagcaagttaaaataaggctagtccgttatcaacttgaaaaagtggcaccgagtcggtgctccagccaccggcctagggcaatgaacacttttttt

SEQ ID NO: 1473 - RNA, 132 nt, synthetic construct
  source 1..132: mol_type = other RNA
gctctttgtgttcattgcccgttttagagctagaaatagcaagttaaaataaggctagtccgttatcaacttgaaaaagtggcaccgagtcggtgcagccaccggcctagggcaatgaacacaaattttttt

SEQ ID NO: 1474 - RNA, 132 nt, synthetic construct
  source 1..132: mol_type = other RNA
gctctttgtgttcattgcccgttttagagctagaaatagcaagttaaaataaggctagtccgttatcaacttgaaaaagtggcaccgagtcggtgcgccaccggcccagggcaatgaacacaaagttttttt

SEQ ID NO: 1475 - RNA, 132 nt, synthetic construct
  source 1..132: mol_type = other RNA
gctctttgtgttcattgcccgttttagagctagaaatagcaagttaaaataaggctagtccgttatcaacttgaaaaagtggcaccgagtcggtgcttccagccaccggcccagggcaatgaacattttttt

SEQ ID NO: 1476 - RNA, 132 nt, synthetic construct
  source 1..132: mol_type = other RNA
gctctttgtgttcattgcccgttttagagctagaaatagcaagttaaaataaggctagtccgttatcaacttgaaaaagtggcaccgagtcggtgcgccaccggcctagggcaatgaacacaaagttttttt

SEQ ID NO: 1477 - RNA, 132 nt, synthetic construct
  source 1..132: mol_type = other RNA
gctctttgtgttcattgcccgttttagagctagaaatagcaagttaaaataaggctagtccgttatcaacttgaaaaagtggcaccgagtcggtgctccagccaccggccgagggcaatgaacacttttttt

SEQ ID NO: 1478 - RNA, 132 nt, synthetic construct
  source 1..132: mol_type = other RNA
gctctttgtgttcattgcccgttttagagctagaaatagcaagttaaaataaggctagtccgttatcaacttgaaaaagtggcaccgagtcggtgcttccagccaccggccaagggcaatgaacattttttt

SEQ ID NO: 1479 - RNA, 132 nt, synthetic construct
  source 1..132: mol_type = other RNA
gctctttgtgttcattgcccgttttagagctagaaatagcaagttaaaataaggctagtccgttatcaacttgaaaaagtggcaccgagtcggtgcttccagccaccggccgagggcaatgaacattttttt

SEQ ID NO: 1480 - RNA, 132 nt, synthetic construct
  source 1..132: mol_type = other RNA
gctctttgtgttcattgcccgttttagagctagaaatagcaagttaaaataaggctagtccgttatcaacttgaaaaagtggcaccgagtcggtgcagccaccggccaagggcaatgaacacaaattttttt

SEQ ID NO: 1481 - RNA, 132 nt, synthetic construct
  source 1..132: mol_type = other RNA
gctctttgtgttcattgcccgttttagagctagaaatagcaagttaaaataaggctagtccgttatcaacttgaaaaagtggcaccgagtcggtgcagccaccggccgagggcaatgaacacaaattttttt

SEQ ID NO: 1482 - RNA, 132 nt, synthetic construct
  source 1..132: mol_type = other RNA
gctctttgtgttcattgcccgttttagagctagaaatagcaagttaaaataaggctagtccgttatcaacttgaaaaagtggcaccgagtcggtgcttccagccaccggcctagggcaatgaacattttttt

SEQ ID NO: 1483 - RNA, 132 nt, synthetic construct
  source 1..132: mol_type = other RNA
gctctttgtgttcattgcccgttttagagctagaaatagcaagttaaaataaggctagtccgttatcaacttgaaaaagtggcaccgagtcggtgctccagccaccggccaagggcaatgaacacttttttt

SEQ ID NO: 1484 - RNA, 132 nt, synthetic construct
  source 1..132: mol_type = other RNA
gctctttgtgttcattgcccgttttagagctagaaatagcaagttaaaataaggctagtccgttatcaacttgaaaaagtggcaccgagtcggtgcagccaccggcccagggcaatgaacacaaattttttt

SEQ ID NO: 1485 - RNA, 133 nt, synthetic construct
  source 1..133: mol_type = other RNA
gctctttgtgttcattgcccgttttagagctagaaatagcaagttaaaataaggctagtccgttatcaacttgaaaaagtggcaccgagtcggtgctccagccaccggcccagggcaatgaacacattttttt

SEQ ID NO: 1486 - RNA, 133 nt, synthetic construct
  source 1..133: mol_type = other RNA
gctctttgtgttcattgcccgttttagagctagaaatagcaagttaaaataaggctagtccgttatcaacttgaaaaagtggcaccgagtcggtgcagccaccggccgagggcaatgaacacaaagttttttt

SEQ ID NO: 1487 - RNA, 133 nt, synthetic construct
  source 1..133: mol_type = other RNA
gctctttgtgttcattgcccgttttagagctagaaatagcaagttaaaataaggctagtccgttatcaacttgaaaaagtggcaccgagtcggtgcttccagccaccggccgagggcaatgaacacttttttt

SEQ ID NO: 1488 - RNA, 133 nt, synthetic construct
  source 1..133: mol_type = other RNA
gctctttgtgttcattgcccgttttagagctagaaatagcaagttaaaataaggctagtccgttatcaacttgaaaaagtggcaccgagtcggtgcagccaccggcctagggcaatgaacacaaagttttttt

SEQ ID NO: 1489 - RNA, 133 nt, synthetic construct
  source 1..133: mol_type = other RNA
gctctttgtgttcattgcccgttttagagctagaaatagcaagttaaaataaggctagtccgttatcaacttgaaaaagtggcaccgagtcggtgcttccagccaccggcccagggcaatgaacacttttttt

SEQ ID NO: 1490 - RNA, 133 nt, synthetic construct
  source 1..133: mol_type = other RNA
gctctttgtgttcattgcccgttttagagctagaaatagcaagttaaaataaggctagtccgttatcaacttgaaaaagtggcaccgagtcggtgcttccagccaccggcctagggcaatgaacacttttttt

SEQ ID NO: 1491 - RNA, 133 nt, synthetic construct
  source 1..133: mol_type = other RNA
gctctttgtgttcattgcccgttttagagctagaaatagcaagttaaaataaggctagtccgttatcaacttgaaaaagtggcaccgagtcggtgcttccagccaccggccaagggcaatgaacacttttttt

SEQ ID NO: 1492 - RNA, 133 nt, synthetic construct
  source 1..133: mol_type = other RNA
gctctttgtgttcattgcccgttttagagctagaaatagcaagttaaaataaggctagtccgttatcaacttgaaaaagtggcaccgagtcggtgctccagccaccggcctagggcaatgaacacattttttt

SEQ ID NO: 1493 - RNA, 133 nt, synthetic construct
  source 1..133: mol_type = other RNA
gctctttgtgttcattgcccgttttagagctagaaatagcaagttaaaataaggctagtccgttatcaacttgaaaaagtggcaccgagtcggtgcagccaccggcccagggcaatgaacacaaagttttttt

SEQ ID NO: 1494 - RNA, 133 nt, synthetic construct
  source 1..133: mol_type = other RNA
gctctttgtgttcattgcccgttttagagctagaaatagcaagttaaaataaggctagtccgttatcaacttgaaaaagtggcaccgagtcggtgctccagccaccggccgagggcaatgaacacattttttt

SEQ ID NO: 1495 - RNA, 133 nt, synthetic construct
  source 1..133: mol_type = other RNA
gctctttgtgttcattgcccgttttagagctagaaatagcaagttaaaataaggctagtccgttatcaacttgaaaaagtggcaccgagtcggtgcagccaccggccaagggcaatgaacacaaagttttttt

SEQ ID NO: 1496 - RNA, 133 nt, synthetic construct
  source 1..133: mol_type = other RNA
gctctttgtgttcattgcccgttttagagctagaaatagcaagttaaaataaggctagtccgttatcaacttgaaaaagtggcaccgagtcggtgctccagccaccggccaagggcaatgaacacattttttt

SEQ ID NO: 1497 - RNA, 134 nt, synthetic construct
  source 1..134: mol_type = other RNA
gctctttgtgttcattgcccgttttagagctagaaatagcaagttaaaataaggctagtccgttatcaacttgaaaaagtggcaccgagtcggtgcttccagccaccggcctagggcaatgaacacattttttt

SEQ ID NO: 1498 - RNA, 134 nt, synthetic construct
  source 1..134: mol_type = other RNA
gctctttgtgttcattgcccgttttagagctagaaatagcaagttaaaataaggctagtccgttatcaacttgaaaaagtggcaccgagtcggtgcttccagccaccggcccagggcaatgaacacattttttt

SEQ ID NO: 1499 - RNA, 134 nt, synthetic construct
  source 1..134: mol_type = other RNA
gctctttgtgttcattgcccgttttagagctagaaatagcaagttaaaataaggctagtccgttatcaacttgaaaaagtggcaccgagtcggtgctccagccaccggccaagggcaatgaacacaattttttt

SEQ ID NO: 1500 - RNA, 134 nt, synthetic construct
  source 1..134: mol_type = other RNA
gctctttgtgttcattgcccgttttagagctagaaatagcaagttaaaataaggctagtccgttatcaacttgaaaaagtggcaccgagtcggtgcttccagccaccggccgagggcaatgaacacattttttt

SEQ ID NO: 1501 - RNA, 134 nt, synthetic construct
  source 1..134: mol_type = other RNA
gctctttgtgttcattgcccgttttagagctagaaatagcaagttaaaataaggctagtccgttatcaacttgaaaaagtggcaccgagtcggtgctccagccaccggcccagggcaatgaacacaattttttt

SEQ ID NO: 1502 - RNA, 134 nt, synthetic construct
  source 1..134: mol_type = other RNA
gctctttgtgttcattgcccgttttagagctagaaatagcaagttaaaataaggctagtccgttatcaacttgaaaaagtggcaccgagtcggtgcttccagccaccggccaagggcaatgaacacattttttt

SEQ ID NO: 1503 - RNA, 134 nt, synthetic construct
  source 1..134: mol_type = other RNA
gctctttgtgttcattgcccgttttagagctagaaatagcaagttaaaataaggctagtccgttatcaacttgaaaaagtggcaccgagtcggtgctccagccaccggcctagggcaatgaacacaattttttt

SEQ ID NO: 1504 - RNA, 134 nt, synthetic construct
  source 1..134: mol_type = other RNA
gctctttgtgttcattgcccgttttagagctagaaatagcaagttaaaataaggctagtccgttatcaacttgaaaaagtggcaccgagtcggtgctccagccaccggccgagggcaatgaacacaattttttt

SEQ ID NO: 1505 - RNA, 135 nt, synthetic construct
  source 1..135: mol_type = other RNA
gctctttgtgttcattgcccgttttagagctagaaatagcaagttaaaataaggctagtccgttatcaacttgaaaaagtggcaccgagtcggtgcttccagccaccggcccagggcaatgaacacaattttttt

SEQ ID NO: 1506 - RNA, 135 nt, synthetic construct
  source 1..135: mol_type = other RNA
gctctttgtgttcattgcccgttttagagctagaaatagcaagttaaaataaggctagtccgttatcaacttgaaaaagtggcaccgagtcggtgcttccagccaccggccgagggcaatgaacacaattttttt

SEQ ID NO: 1507 - RNA, 135 nt, synthetic construct
  source 1..135: mol_type = other RNA
gctctttgtgttcattgcccgttttagagctagaaatagcaagttaaaataaggctagtccgttatcaacttgaaaaagtggcaccgagtcggtgctccagccaccggcccagggcaatgaacacaaattttttt

SEQ ID NO: 1508 - RNA, 135 nt, synthetic construct
  source 1..135: mol_type = other RNA
gctctttgtgttcattgcccgttttagagctagaaatagcaagttaaaataaggctagtccgttatcaacttgaaaaagtggcaccgagtcggtgctccagccaccggcctagggcaatgaacacaaattttttt

SEQ ID NO: 1509 - RNA, 135 nt, synthetic construct
  source 1..135: mol_type = other RNA
gctctttgtgttcattgcccgttttagagctagaaatagcaagttaaaataaggctagtccgttatcaacttgaaaaagtggcaccgagtcggtgctccagccaccggccaagggcaatgaacacaaattttttt

SEQ ID NO: 1510 - RNA, 135 nt, synthetic construct
  source 1..135: mol_type = other RNA
gctctttgtgttcattgcccgttttagagctagaaatagcaagttaaaataaggctagtccgttatcaacttgaaaaagtggcaccgagtcggtgcttccagccaccggcctagggcaatgaacacaattttttt

SEQ ID NO: 1511 - RNA, 135 nt, synthetic construct
  source 1..135: mol_type = other RNA
gctctttgtgttcattgcccgttttagagctagaaatagcaagttaaaataaggctagtccgttatcaacttgaaaaagtggcaccgagtcggtgctccagccaccggccgagggcaatgaacacaaattttttt

SEQ ID NO: 1512 - RNA, 135 nt, synthetic construct
  source 1..135: mol_type = other RNA
gctctttgtgttcattgcccgttttagagctagaaatagcaagttaaaataaggctagtccgttatcaacttgaaaaagtggcaccgagtcggtgcttccagccaccggccaagggcaatgaacacaattttttt

SEQ ID NO: 1513 - RNA, 136 nt, synthetic construct
  source 1..136: mol_type = other RNA
gctctttgtgttcattgcccgttttagagctagaaatagcaagttaaaataaggctagtccgttatcaacttgaaaaagtggcaccgagtcggtgcttccagccaccggccgagggcaatgaacacaaattttttt

SEQ ID NO: 1514 - RNA, 136 nt, synthetic construct
  source 1..136: mol_type = other RNA
gctctttgtgttcattgcccgttttagagctagaaatagcaagttaaaataaggctagtccgttatcaacttgaaaaagtggcaccgagtcggtgctccagccaccggcccagggcaatgaacacaaagttttttt

SEQ ID NO: 1515 - RNA, 136 nt, synthetic construct
  source 1..136: mol_type = other RNA
gctctttgtgttcattgcccgttttagagctagaaatagcaagttaaaataaggctagtccgttatcaacttgaaaaagtggcaccgagtcggtgctccagccaccggccaagggcaatgaacacaaagttttttt

SEQ ID NO: 1516 - RNA, 136 nt, synthetic construct
  source 1..136: mol_type = other RNA
gctctttgtgttcattgcccgttttagagctagaaatagcaagttaaaataaggctagtccgttatcaacttgaaaaagtggcaccgagtcggtgcttccagccaccggccaagggcaatgaacacaaattttttt

SEQ ID NO: 1517 - RNA, 136 nt, synthetic construct
  source 1..136: mol_type = other RNA
gctctttgtgttcattgcccgttttagagctagaaatagcaagttaaaataaggctagtccgttatcaacttgaaaaagtggcaccgagtcggtgcttccagccaccggcccagggcaatgaacacaaattttttt

SEQ ID NO: 1518 - RNA, 136 nt, synthetic construct
  source 1..136: mol_type = other RNA
gctctttgtgttcattgcccgttttagagctagaaatagcaagttaaaataaggctagtccgttatcaacttgaaaaagtggcaccgagtcggtgctccagccaccggcctagggcaatgaacacaaagttttttt

SEQ ID NO: 1519 - RNA, 136 nt, synthetic construct
  source 1..136: mol_type = other RNA
gctctttgtgttcattgcccgttttagagctagaaatagcaagttaaaataaggctagtccgttatcaacttgaaaaagtggcaccgagtcggtgcttccagccaccggcctagggcaatgaacacaaattttttt

SEQ ID NO: 1520 - RNA, 136 nt, synthetic construct
  source 1..136: mol_type = other RNA
gctctttgtgttcattgcccgttttagagctagaaatagcaagttaaaataaggctagtccgttatcaacttgaaaaagtggcaccgagtcggtgctccagccaccggccgagggcaatgaacacaaagttttttt

SEQ ID NO: 1521 - RNA, 137 nt, synthetic construct
  source 1..137: mol_type = other RNA
gctctttgtgttcattgcccgttttagagctagaaatagcaagttaaaataaggctagtccgttatcaacttgaaaaagtggcaccgagtcggtgcttccagccaccggcctagggcaatgaacacaaagttttttt

SEQ ID NO: 1522 - RNA, 137 nt, synthetic construct
  source 1..137: mol_type = other RNA
gctctttgtgttcattgcccgttttagagctagaaatagcaagttaaaataaggctagtccgttatcaacttgaaaaagtggcaccgagtcggtgcttccagccaccggccaagggcaatgaacacaaagttttttt

SEQ ID NO: 1523 - RNA, 137 nt, synthetic construct
  source 1..137: mol_type = other RNA
gctctttgtgttcattgcccgttttagagctagaaatagcaagttaaaataaggctagtccgttatcaacttgaaaaagtggcaccgagtcggtgcttccagccaccggccgagggcaatgaacacaaagttttttt

SEQ ID NO: 1524 - RNA, 137 nt, synthetic construct
  source 1..137: mol_type = other RNA
gctctttgtgttcattgcccgttttagagctagaaatagcaagttaaaataaggctagtccgttatcaacttgaaaaagtggcaccgagtcggtgcttccagccaccggcccagggcaatgaacacaaagttttttt

SEQ ID NO: 1525 - RNA, 96 nt, synthetic construct
  source 1..96: mol_type = other RNA
attctaaacatggtgttcaggttttagagctagaaatagcaagttaaaataaggctagtccgttatcaacttgaaaaagtggcaccgagtcggtgc

SEQ ID NO: 1526 - RNA, 96 nt, synthetic construct
  source 1..96: mol_type = other RNA
aagtgagatttgtttactgagttttagagctagaaatagcaagttaaaataaggctagtccgttatcaacttgaaaaagtggcaccgagtcggtgc

SEQ ID NO: 1527 - RNA, 97 nt, synthetic construct
  source 1..97: mol_type = other RNA
gaagtgagatttgtttactgagttttagagctagaaatagcaagttaaaataaggctagtccgttatcaacttgaaaaagtggcaccgagtcggtgc

SEQ ID NO: 1528 - RNA, 97 nt, synthetic construct
  source 1..97: mol_type = other RNA
gattctaaacatggtgttcaggttttagagctagaaatagcaagttaaaataaggctagtccgttatcaacttgaaaaagtggcaccgagtcggtgc

SEQ ID NO: 1529 - RNA, 16 nt, synthetic construct
  source 1..16: mol_type = other RNA
ttgtgttcattgccct

SEQ ID NO: 1530 - RNA, 17 nt, synthetic construct
  source 1..17: mol_type = other RNA
tttgtgttcattgccct

SEQ ID NO: 1531 - RNA, 18 nt, synthetic construct
  source 1..18: mol_type = other RNA
ctttgtgttcattgccct

SEQ ID NO: 1532 - RNA, 19 nt, synthetic construct
  source 1..19: mol_type = other RNA
tctttgtgttcattgccct

SEQ ID NO: 1533 - RNA, 20 nt, synthetic construct
  source 1..20: mol_type = other RNA
ctctttgtgttcattgccct

SEQ ID NO: 1534 - RNA, 21 nt, synthetic construct
  source 1..21: mol_type = other RNA
gctctttgtgttcattgccct

SEQ ID NO: 1535 - RNA, 22 nt, synthetic construct
  source 1..22: mol_type = other RNA
tgctctttgtgttcattgccct

SEQ ID NO: 1536-1542 - skipped (7 entries)

SEQ ID NO: 1543 - RNA, 10 nt, synthetic construct
  source 1..10: mol_type = other RNA
gcaatgaaca

SEQ ID NO: 1544 - RNA, 11 nt, synthetic construct
  source 1..11: mol_type = other RNA
gcaatgaacac

SEQ ID NO: 1545 - RNA, 12 nt, synthetic construct
  source 1..12: mol_type = other RNA
gcaatgaacaca

SEQ ID NO: 1546 - RNA, 13 nt, synthetic construct
  source 1..13: mol_type = other RNA
gcaatgaacacaa

SEQ ID NO: 1547 - RNA, 14 nt, synthetic construct
  source 1..14: mol_type = other RNA
gcaatgaacacaaa

SEQ ID NO: 1548 - RNA, 15 nt, synthetic construct
  source 1..15: mol_type = other RNA
gcaatgaacacaaag

SEQ ID NO: 1549 - RNA, 16 nt, synthetic construct
  source 1..16: mol_type = other RNA
gcaatgaacacaaaga

SEQ ID NO: 1550 - RNA, 17 nt, synthetic construct
  source 1..17: mol_type = other RNA
gcaatgaacacaaagag

SEQ ID NO: 1551 - RNA, 18 nt, synthetic construct
  source 1..18: mol_type = other RNA
gcaatgaacacaaagagc

SEQ ID NO: 1552 - RNA, 19 nt, synthetic construct
  source 1..19: mol_type = other RNA
gcaatgaacacaaagagca

SEQ ID NO: 1553 - RNA, 10 nt, synthetic construct
  source 1..10: mol_type = other RNA
ccggcccagg

SEQ ID NO: 1554 - RNA, 11 nt, synthetic construct
  source 1..11: mol_type = other RNA
accggcccagg

SEQ ID NO: 1555 - RNA, 12 nt, synthetic construct
  source 1..12: mol_type = other RNA
caccggcccagg

SEQ ID NO: 1556 - RNA, 13 nt, synthetic construct
  source 1..13: mol_type = other RNA
ccaccggcccagg

SEQ ID NO: 1557 - RNA, 14 nt, synthetic construct
  source 1..14: mol_type = other RNA
gccaccggcccagg

SEQ ID NO: 1558 - RNA, 15 nt, synthetic construct
  source 1..15: mol_type = other RNA
agccaccggcccagg

SEQ ID NO: 1559 - RNA, 16 nt, synthetic construct
  source 1..16: mol_type = other RNA
cagccaccggcccagg

SEQ ID NO: 1560 - RNA, 17 nt, synthetic construct
  source 1..17: mol_type = other RNA
ccagccaccggcccagg

SEQ ID NO: 1561 - RNA, 18 nt, synthetic construct
  source 1..18: mol_type = other RNA
tccagccaccggcccagg

SEQ ID NO: 1562 - RNA, 19 nt, synthetic construct
  source 1..19: mol_type = other RNA
ttccagccaccggcccagg

SEQ ID NO: 1563 - RNA, 20 nt, synthetic construct
  source 1..20: mol_type = other RNA
gttccagccaccggcccagg

SEQ ID NO: 1564 - RNA, 21 nt, synthetic construct
  source 1..21: mol_type = other RNA
tgttccagccaccggcccagg

SEQ ID NO: 1565 - RNA, 22 nt, synthetic construct
  source 1..22: mol_type = other RNA
gtgttccagccaccggcccagg

SEQ ID NO: 1566 - RNA, 23 nt, synthetic construct
  source 1..23: mol_type = other RNA
agtgttccagccaccggcccagg

SEQ ID NO: 1567 - RNA, 24 nt, synthetic construct
  source 1..24: mol_type = other RNA
aagtgttccagccaccggcccagg

SEQ ID NO: 1568 - RNA, 25 nt, synthetic construct
  source 1..25: mol_type = other RNA
caagtgttccagccaccggcccagg

SEQ ID NO: 1569 - RNA, 26 nt, synthetic construct
  source 1..26: mol_type = other RNA
ccaagtgttccagccaccggcccagg

SEQ ID NO: 1570 - RNA, 27 nt, synthetic construct
  source 1..27: mol_type = other RNA
gccaagtgttccagccaccggcccagg

SEQ ID NO: 1571 - RNA, 28 nt, synthetic construct
  source 1..28: mol_type = other RNA
tgccaagtgttccagccaccggcccagg

SEQ ID NO: 1572 - RNA, 29 nt, synthetic construct
  source 1..29: mol_type = other RNA
ttgccaagtgttccagccaccggcccagg

SEQ ID NO: 1573 - RNA, 30 nt, synthetic construct
  source 1..30: mol_type = other RNA
tttgccaagtgttccagccaccggcccagg

SEQ ID NO: 1574 - RNA, 31 nt, synthetic construct
  source 1..31: mol_type = other RNA
ctttgccaagtgttccagccaccggcccagg

SEQ ID NO: 1575 - RNA, 32 nt, synthetic construct
  source 1..32: mol_type = other RNA
cctttgccaagtgttccagccaccggcccagg

SEQ ID NO: 1576 - RNA, 33 nt, synthetic construct
  source 1..33: mol_type = other RNA
acctttgccaagtgttccagccaccggcccagg

SEQ ID NO: 1577 - RNA, 34 nt, synthetic construct
  source 1..34: mol_type = other RNA
tacctttgccaagtgttccagccaccggcccagg

SEQ ID NO: 1578 - RNA, 35 nt, synthetic construct
  source 1..35: mol_type = other RNA
ttacctttgccaagtgttccagccaccggcccagg

SEQ ID NO: 1579 - RNA, 36 nt, synthetic construct
  source 1..36: mol_type = other RNA
gttacctttgccaagtgttccagccaccggcccagg

SEQ ID NO: 1580 - RNA, 37 nt, synthetic construct
  source 1..37: mol_type = other RNA
tgttacctttgccaagtgttccagccaccggcccagg

SEQ ID NO: 1581 - RNA, 38 nt, synthetic construct
  source 1..38: mol_type = other RNA
ctgttacctttgccaagtgttccagccaccggcccagg

SEQ ID NO: 1582 - RNA, 39 nt, synthetic construct
  source 1..39: mol_type = other RNA
gctgttacctttgccaagtgttccagccaccggcccagg

SEQ ID NO: 1583 - RNA, 40 nt, synthetic construct
  source 1..40: mol_type = other RNA
tgctgttacctttgccaagtgttccagccaccggcccagg

SEQ ID NO: 1584 - RNA, 41 nt, synthetic construct
  source 1..41: mol_type = other RNA
ctgctgttacctttgccaagtgttccagccaccggcccagg

SEQ ID NO: 1585 - RNA, 42 nt, synthetic construct
  source 1..42: mol_type = other RNA
gctgctgttacctttgccaagtgttccagccaccggcccagg

SEQ ID NO: 1586 - RNA, 43 nt, synthetic construct
  source 1..43: mol_type = other RNA
agctgctgttacctttgccaagtgttccagccaccggcccagg

SEQ ID NO: 1587 - RNA, 44 nt, synthetic construct
  source 1..44: mol_type = other RNA
aagctgctgttacctttgccaagtgttccagccaccggcccagg

SEQ ID NO: 1588 - RNA, 45 nt, synthetic construct
  source 1..45: mol_type = other RNA
gaagctgctgttacctttgccaagtgttccagccaccggcccagg

SEQ ID NO: 1589 - RNA, 46 nt, synthetic construct
  source 1..46: mol_type = other RNA
tgaagctgctgttacctttgccaagtgttccagccaccggcccagg

SEQ ID NO: 1590 - RNA, 47 nt, synthetic construct
  source 1..47: mol_type = other RNA
ctgaagctgctgttacctttgccaagtgttccagccaccggcccagg

SEQ ID NO: 1591 - RNA, 48 nt, synthetic construct
  source 1..48: mol_type = other RNA
cctgaagctgctgttacctttgccaagtgttccagccaccggcccagg

SEQ ID NO: 1592 - RNA, 49 nt, synthetic construct
  source 1..49: mol_type = other RNA
acctgaagctgctgttacctttgccaagtgttccagccaccggcccagg

SEQ ID NO: 1593 - RNA, 50 nt, synthetic construct
  source 1..50: mol_type = other RNA
aacctgaagctgctgttacctttgccaagtgttccagccaccggcccagg

SEQ ID NO: 1594 - RNA, 51 nt, synthetic construct
  source 1..51: mol_type = other RNA
gaacctgaagctgctgttacctttgccaagtgttccagccaccggcccagg

SEQ ID NO: 1595 - RNA, 52 nt, synthetic construct
  source 1..52: mol_type = other RNA
tgaacctgaagctgctgttacctttgccaagtgttccagccaccggcccagg

SEQ ID NO: 1596 - RNA, 53 nt, synthetic construct
  source 1..53: mol_type = other RNA
ctgaacctgaagctgctgttacctttgccaagtgttccagccaccggcccagg

SEQ ID NO: 1597 - RNA, 54 nt, synthetic construct
  source 1..54: mol_type = other RNA
tctgaacctgaagctgctgttacctttgccaagtgttccagccaccggcccagg

SEQ ID NO: 1598 - RNA, 55 nt, synthetic construct
  source 1..55: mol_type = other RNA
ttctgaacctgaagctgctgttacctttgccaagtgttccagccaccggcccagg

SEQ ID NO: 1599 - RNA, 56 nt, synthetic construct
  source 1..56: mol_type = other RNA
tttctgaacctgaagctgctgttacctttgccaagtgttccagccaccggcccagg

SEQ ID NO: 1600 - RNA, 57 nt, synthetic construct
  source 1..57: mol_type = other RNA
ttttctgaacctgaagctgctgttacctttgccaagtgttccagccaccggcccagg

SEQ ID NO: 1601 - RNA, 58 nt, synthetic construct
  source 1..58: mol_type = other RNA
cttttctgaacctgaagctgctgttacctttgccaagtgttccagccaccggcccagg

SEQ ID NO: 1602 - RNA, 59 nt, synthetic construct
  source 1..59: mol_type = other RNA
tcttttctgaacctgaagctgctgttacctttgccaagtgttccagccaccggcccagg

SEQ ID NO: 1603 - RNA, 60 nt, synthetic construct
  source 1..60: mol_type = other RNA
ctcttttctgaacctgaagctgctgttacctttgccaagtgttccagccaccggcccagg

SEQ ID NO: 1604 - RNA, 61 nt, synthetic construct
  source 1..61: mol_type = other RNA
gctcttttctgaacctgaagctgctgttacctttgccaagtgttccagccaccggcccagg

SEQ ID NO: 1605 - RNA, 62 nt, synthetic construct
  source 1..62: mol_type = other RNA
agctcttttctgaacctgaagctgctgttacctttgccaagtgttccagccaccggcccagg

SEQ ID NO: 1606 - RNA, 63 nt, synthetic construct
  source 1..63: mol_type = other RNA
cagctcttttctgaacctgaagctgctgttacctttgccaagtgttccagccaccggcccagg

SEQ ID NO: 1607 - RNA, 64 nt, synthetic construct
  source 1..64: mol_type = other RNA
gcagctcttttctgaacctgaagctgctgttacctttgccaagtgttccagccaccggcccagg

SEQ ID NO: 1608 - RNA, 65 nt, synthetic construct
  source 1..65: mol_type = other RNA
agcagctcttttctgaacctgaagctgctgttacctttgccaagtgttccagccaccggcccagg

SEQ ID NO: 1609 - RNA, 66 nt, synthetic construct
  source 1..66: mol_type = other RNA
gagcagctcttttctgaacctgaagctgctgttacctttgccaagtgttccagccaccggcccagg

SEQ ID NO: 1610 - RNA, 67 nt, synthetic construct
  source 1..67: mol_type = other RNA
ggagcagctcttttctgaacctgaagctgctgttacctttgccaagtgttccagccaccggcccagg

SEQ ID NO: 1611 - RNA, 68 nt, synthetic construct
  source 1..68: mol_type = other RNA
aggagcagctcttttctgaacctgaagctgctgttacctttgccaagtgttccagccaccggcccagg

SEQ ID NO: 1612 - RNA, 69 nt, synthetic construct
  source 1..69: mol_type = other RNA
aaggagcagctcttttctgaacctgaagctgctgttacctttgccaagtgttccagccaccggcccagg

SEQ ID NO: 1613 - RNA, 70 nt, synthetic construct
  source 1..70: mol_type = other RNA
gaaggagcagctcttttctgaacctgaagctgctgttacctttgccaagtgttccagccaccggcccagg

SEQ ID NO: 1614 - RNA, 71 nt, synthetic construct
  source 1..71: mol_type = other RNA
tgaaggagcagctcttttctgaacctgaagctgctgttacctttgccaagtgttccagccaccggcccagg

SEQ ID NO: 1615 - RNA, 72 nt, synthetic construct
  source 1..72: mol_type = other RNA
ctgaaggagcagctcttttctgaacctgaagctgctgttacctttgccaagtgttccagccaccggcccagg

SEQ ID NO: 1616 - RNA, 73 nt, synthetic construct
  source 1..73: mol_type = other RNA
actgaaggagcagctcttttctgaacctgaagctgctgttacctttgccaagtgttccagccaccggcccagg

SEQ ID NO: 1617 - RNA, 74 nt, synthetic construct
  source 1..74: mol_type = other RNA
tactgaaggagcagctcttttctgaacctgaagctgctgttacctttgccaagtgttccagccaccggcccagg

SEQ ID NO: 1618 - RNA, 75 nt, synthetic construct
  source 1..75: mol_type = other RNA
ttactgaaggagcagctcttttctgaacctgaagctgctgttacctttgccaagtgttccagccaccggcccagg

SEQ ID NO: 1619 - RNA, 76 nt, synthetic construct
  source 1..76: mol_type = other RNA
tttactgaaggagcagctcttttctgaacctgaagctgctgttacctttgccaagtgttccagccaccggcccagg

SEQ ID NO: 1620 - RNA, 77 nt, synthetic construct
  source 1..77: mol_type = other RNA
gtttactgaaggagcagctcttttctgaacctgaagctgctgttacctttgccaagtgttccagccaccggcccagg

SEQ ID NO: 1621 - RNA, 78 nt, synthetic construct
  source 1..78: mol_type = other RNA
tgtttactgaaggagcagctcttttctgaacctgaagctgctgttacctttgccaagtgttccagccaccggcccagg

SEQ ID NO: 1622 - RNA, 79 nt, synthetic construct
  source 1..79: mol_type = other RNA
ttgtttactgaaggagcagctcttttctgaacctgaagctgctgttacctttgccaagtgttccagccaccggcccagg

SEQ ID NO: 1623 - RNA, 80 nt, synthetic construct
  source 1..80: mol_type = other RNA
tttgtttactgaaggagcagctcttttctgaacctgaagctgctgttacctttgccaagtgttccagccaccggcccagg

SEQ ID NO: 1624 - RNA, 81 nt, synthetic construct
  source 1..81: mol_type = other RNA
atttgtttactgaaggagcagctcttttctgaacctgaagctgctgttacctttgccaagtgttccagccaccggcccagg

SEQ ID NO: 1625 - RNA, 82 nt, synthetic construct
  source 1..82: mol_type = other RNA
gatttgtttactgaaggagcagctcttttctgaacctgaagctgctgttacctttgccaagtgttccagccaccggcccagg

SEQ ID NO: 1626 - RNA, 83 nt, synthetic construct
  source 1..83: mol_type = other RNA
agatttgtttactgaaggagcagctcttttctgaacctgaagctgctgttacctttgccaagtgttccagccaccggcccagg

SEQ ID NO: 1627 - RNA, 84 nt, synthetic construct
  source 1..84: mol_type = other RNA
gagatttgtttactgaaggagcagctcttttctgaacctgaagctgctgttacctttgccaagtgttccagccaccggcccagg

SEQ ID NO: 1628 - RNA, 85 nt, synthetic construct
  source 1..85: mol_type = other RNA
tgagatttgtttactgaaggagcagctcttttctgaacctgaagctgctgttacctttgccaagtgttccagccaccggcccagg

SEQ ID NO: 1629 - RNA, 86 nt, synthetic construct
  source 1..86: mol_type = other RNA
gtgagatttgtttactgaaggagcagctcttttctgaacctgaagctgctgttacctttgccaagtgttccagccaccggcccagg

SEQ ID NO: 1630 - RNA, 87 nt, synthetic construct
  source 1..87: mol_type = other RNA
agtgagatttgtttactgaaggagcagctcttttctgaacctgaagctgctgttacctttgccaagtgttccagccaccggcccagg

SEQ ID NO: 1631 - RNA, 88 nt, synthetic construct
  source 1..88: mol_type = other RNA
aagtgagatttgtttactgaaggagcagctcttttctgaacctgaagctgctgttacctttgccaagtgttccagccaccggcccagg

SEQ ID NO: 1632 - RNA, 89 nt, synthetic construct
  source 1..89: mol_type = other RNA
gaagtgagatttgtttactgaaggagcagctcttttctgaacctgaagctgctgttacctttgccaagtgttccagccaccggcccagg

SEQ ID NO: 1633 - RNA, 90 nt, synthetic construct
  source 1..90: mol_type = other RNA
ggaagtgagatttgtttactgaaggagcagctcttttctgaacctgaagctgctgttacctttgccaagtgttccagccaccggcccagg

SEQ ID NO: 1634 - RNA, 91 nt, synthetic construct
  source 1..91: mol_type = other RNA
aggaagtgagatttgtttactgaaggagcagctcttttctgaacctgaagctgctgttacctttgccaagtgttccagccaccggcccagg

SEQ ID NO: 1635 - RNA, 92 nt, synthetic construct
  source 1..92: mol_type = other RNA
gaggaagtgagatttgtttactgaaggagcagctcttttctgaacctgaagctgctgttacctttgccaagtgttccagccaccggcccagg

SEQ ID NO: 1636 - RNA, 93 nt, synthetic construct
  source 1..93: mol_type = other RNA
agaggaagtgagatttgtttactgaaggagcagctcttttctgaacctgaagctgctgttacctttgccaagtgttccagccaccggcccagg

SEQ ID NO: 1637 - RNA, 94 nt, synthetic construct
  source 1..94: mol_type = other RNA
cagaggaagtgagatttgtttactgaaggagcagctcttttctgaacctgaagctgctgttacctttgccaagtgttccagccaccggcccagg

SEQ ID NO: 1638 - RNA, 95 nt, synthetic construct
  source 1..95: mol_type = other RNA
tcagaggaagtgagatttgtttactgaaggagcagctcttttctgaacctgaagctgctgttacctttgccaagtgttccagccaccggcccagg

SEQ ID NO: 1639 - RNA, 96 nt, synthetic construct
  source 1..96: mol_type = other RNA
ttcagaggaagtgagatttgtttactgaaggagcagctcttttctgaacctgaagctgctgttacctttgccaagtgttccagccaccggcccagg

SEQ ID NO: 1640 - RNA, 97 nt, synthetic construct
  source 1..97: mol_type = other RNA
gttcagaggaagtgagatttgtttactgaaggagcagctcttttctgaacctgaagctgctgttacctttgccaagtgttccagccaccggcccagg

SEQ ID NO: 1641 - RNA, 98 nt, synthetic construct
  source 1..98: mol_type = other RNA
tgttcagaggaagtgagatttgtttactgaaggagcagctcttttctgaacctgaagctgctgttacctttgccaagtgttccagccaccggcccagg

SEQ ID NO: 1642 - RNA, 99 nt, synthetic construct
  source 1..99: mol_type = other RNA
gtgttcagaggaagtgagatttgtttactgaaggagcagctcttttctgaacctgaagctgctgttacctttgccaagtgttccagccaccggcccagg

SEQ ID NO: 1643 - RNA, 100 nt, synthetic construct
  source 1..100: mol_type = other RNA
ggtgttcagaggaagtgagatttgtttactgaaggagcagctcttttctgaacctgaagctgctgttacctttgccaagtgttccagccaccggcccagg

SEQ ID NO: 1644 - RNA, 115 nt, synthetic construct
  source 1..115: mol_type = other RNA
ctctttgtgttcattgccctgttttagagctagaaatagcaagttaaaataaggctagtccgttatcaacttgaaaaagtggcaccgagtcggtgcaccggcccagggcaatgaa

SEQ ID NO: 1645 - RNA, 116 nt, synthetic construct
  source 1..116: mol_type = other RNA
ctctttgtgttcattgccctgttttagagctagaaatagcaagttaaaataaggctagtccgttatcaacttgaaaaagtggcaccgagtcggtgcaccggcccagggcaatgaac

SEQ ID NO: 1646 - RNA, 117 nt, synthetic construct
  source 1..117: mol_type = other RNA
ctctttgtgttcattgccctgttttagagctagaaatagcaagttaaaataaggctagtccgttatcaacttgaaaaagtggcaccgagtcggtgcaccggcccagggcaatgaaca

SEQ ID NO: 1647 - RNA, 118 nt, synthetic construct
  source 1..118: mol_type = other RNA
ctctttgtgttcattgccctgttttagagctagaaatagcaagttaaaataaggctagtccgttatcaacttgaaaaagtggcaccgagtcggtgcaccggcccagggcaatgaacac

SEQ ID NO: 1648 - RNA, 118 nt, synthetic construct
  source 1..118: mol_type = other RNA
ctctttgtgttcattgccctgttttagagctagaaatagcaagttaaaataaggctagtccgttatcaacttgaaaaagtggcaccgagtcggtgcgccaccggcccagggcaatgaa

SEQ ID NO: 1649 - RNA, 119 nt, synthetic construct
  source 1..119: mol_type = other RNA
ctctttgtgttcattgccctgttttagagctagaaatagcaagttaaaataaggctagtccgttatcaacttgaaaaagtggcaccgagtcggtgcgccaccggcccagggcaatgaac

SEQ ID NO: 1650 - RNA, 119 nt, synthetic construct
  source 1..119: mol_type = other RNA
ctctttgtgttcattgccctgttttagagctagaaatagcaagttaaaataaggctagtccgttatcaacttgaaaaagtggcaccgagtcggtgcaccggcccagggcaatgaacaca

SEQ ID NO: 1651 - RNA, 119 nt, synthetic construct
  source 1..119: mol_type = other RNA
ctctttgtgttcattgccctgttttagagctagaaatagcaagttaaaataaggctagtccgttatcaacttgaaaaagtggcaccgagtcggtgcagccaccggcccagggcaatgaa

SEQ ID NO: 1652 - RNA, 120 nt, synthetic construct
  source 1..120: mol_type = other RNA
ctctttgtgttcattgccctgttttagagctagaaatagcaagttaaaataaggctagtccgttatcaacttgaaaaagtggcaccgagtcggtgcagccaccggcccagggcaatgaac

SEQ ID NO: 1653 - RNA, 120 nt, synthetic construct
  source 1..120: mol_type = other RNA
ctctttgtgttcattgccctgttttagagctagaaatagcaagttaaaataaggctagtccgttatcaacttgaaaaagtggcaccgagtcggtgcgccaccggcccagggcaatgaaca

SEQ ID NO: 1654 - RNA, 120 nt, synthetic construct
  source 1..120: mol_type = other RNA
ctctttgtgttcattgccctgttttagagctagaaatagcaagttaaaataaggctagtccgttatcaacttgaaaaagtggcaccgagtcggtgcaccggcccagggcaatgaacacaa

SEQ ID NO: 1655 - RNA, 121 nt, synthetic construct
  source 1..121: mol_type = other RNA
ctctttgtgttcattgccctgttttagagctagaaatagcaagttaaaataaggctagtccgttatcaacttgaaaaagtggcaccgagtcggtgcaccggcccagggcaatgaacacaaa

SEQ ID NO: 1656 - RNA, 121 nt, synthetic construct
  source 1..121: mol_type = other RNA
ctctttgtgttcattgccctgttttagagctagaaatagcaagttaaaataaggctagtccgttatcaacttgaaaaagtggcaccgagtcggtgcgccaccggcccagggcaatgaacac

SEQ ID NO: 1657 - RNA, 121 nt, synthetic construct
  source 1..121: mol_type = other RNA
ctctttgtgttcattgccctgttttagagctagaaatagcaagttaaaataaggctagtccgttatcaacttgaaaaagtggcaccgagtcggtgcagccaccggcccagggcaatgaaca

SEQ ID NO: 1658 - RNA, 122 nt, synthetic construct
  source 1..122: mol_type = other RNA
ctctttgtgttcattgccctgttttagagctagaaatagcaagttaaaataaggctagtccgttatcaacttgaaaaagtggcaccgagtcggtgctccagccaccggcccagggcaatgaa

SEQ ID NO: 1659 - RNA, 122 nt, synthetic construct
  source 1..122: mol_type = other RNA
ctctttgtgttcattgccctgttttagagctagaaatagcaagttaaaataaggctagtccgttatcaacttgaaaaagtggcaccgagtcggtgcagccaccggcccagggcaatgaacac

SEQ ID NO: 1660 - RNA, 122 nt, synthetic construct
  source 1..122: mol_type = other RNA
ctctttgtgttcattgccctgttttagagctagaaatagcaagttaaaataaggctagtccgttatcaacttgaaaaagtggcaccgagtcggtgcgccaccggcccagggcaatgaacaca

SEQ ID NO: 1661 - RNA, 123 nt, synthetic construct
  source 1..123: mol_type = other RNA
ctctttgtgttcattgccctgttttagagctagaaatagcaagttaaaataaggctagtccgttatcaacttgaaaaagtggcaccgagtcggtgctccagccaccggcccagggcaatgaac

SEQ ID NO: 1662 - RNA, 123 nt, synthetic construct
  source 1..123: mol_type = other RNA
gctctttgtgttcattgccctgttttagagctagaaatagcaagttaaaataaggctagtccgttatcaacttgaaaaagtggcaccgagtcggtgcaccggcccagggcaatgaattttttt

SEQ ID NO: 1663 - RNA, 123 nt, synthetic construct
  source 1..123: mol_type = other RNA
ctctttgtgttcattgccctgttttagagctagaaatagcaagttaaaataaggctagtccgttatcaacttgaaaaagtggcaccgagtcggtgcagccaccggcccagggcaatgaacaca

SEQ ID NO: 1664 - RNA, 123 nt, synthetic construct
  source 1..123: mol_type = other RNA
ctctttgtgttcattgccctgttttagagctagaaatagcaagttaaaataaggctagtccgttatcaacttgaaaaagtggcaccgagtcggtgcttccagccaccggcccagggcaatgaa

SEQ ID NO: 1665 - RNA, 123 nt, synthetic construct
  source 1..123: mol_type = other RNA
ctctttgtgttcattgccctgttttagagctagaaatagcaagttaaaataaggctagtccgttatcaacttgaaaaagtggcaccgagtcggtgcgccaccggcccagggcaatgaacacaa

SEQ ID NO: 1666 - RNA, 124 nt, synthetic construct
  source 1..124: mol_type = other RNA
ctctttgtgttcattgccctgttttagagctagaaatagcaagttaaaataaggctagtccgttatcaacttgaaaaagtggcaccgagtcggtgcgccaccggcccagggcaatgaacacaaa

SEQ ID NO: 1667 - RNA, 124 nt, synthetic construct
  source 1..124: mol_type = other RNA
ctctttgtgttcattgccctgttttagagctagaaatagcaagttaaaataaggctagtccgttatcaacttgaaaaagtggcaccgagtcggtgctccagccaccggcccagggcaatgaaca

SEQ ID NO: 1668 - RNA, 124 nt, synthetic construct
  source 1..124: mol_type = other RNA
gctctttgtgttcattgccctgttttagagctagaaatagcaagttaaaataaggctagtccgttatcaacttgaaaaagtggcaccgagtcggtgcaccggcccagggcaatgaacttttttt

SEQ ID NO: 1669 - RNA, 124 nt, synthetic construct
  source 1..124: mol_type = other RNA
ctctttgtgttcattgccctgttttagagctagaaatagcaagttaaaataaggctagtccgttatcaacttgaaaaagtggcaccgagtcggtgcagccaccggcccagggcaatgaacacaa

SEQ ID NO: 1670 - RNA, 124 nt, synthetic construct
  source 1..124: mol_type = other RNA
ctctttgtgttcattgccctgttttagagctagaaatagcaagttaaaataaggctagtccgttatcaacttgaaaaagtggcaccgagtcggtgcttccagccaccggcccagggcaatgaac

SEQ ID NO: 1671 - RNA, 124 nt, synthetic construct
  source 1..124: mol_type = other RNA
ctctttgtgttcattgccctgttttagagctagaaatagcaagttaaaataaggctagtccgttatcaacttgaaaaagtggcaccgagtcggtgcgttccagccaccggcccagggcaatgaa

SEQ ID NO: 1672 - RNA, 125 nt, synthetic construct
  source 1..125: mol_type = other RNA
ctctttgtgttcattgccctgttttagagctagaaatagcaagttaaaataaggctagtccgttatcaacttgaaaaagtggcaccgagtcggtgctccagccaccggcccagggcaatgaacac

SEQ ID NO: 1673 - RNA, 125 nt, synthetic construct
  source 1..125: mol_type = other RNA
gctctttgtgttcattgccctgttttagagctagaaatagcaagttaaaataaggctagtccgttatcaacttgaaaaagtggcaccgagtcggtgcaccggcccagggcaatgaacattttttt

SEQ ID NO: 1674 - RNA, 125 nt, synthetic construct
  source 1..125: mol_type = other RNA
ctctttgtgttcattgccctgttttagagctagaaatagcaagttaaaataaggctagtccgttatcaacttgaaaaagtggcaccgagtcggtgcagccaccggcccagggcaatgaacacaaa

SEQ ID NO: 1675 - RNA, 125 nt, synthetic construct
  source 1..125: mol_type = other RNA
ctctttgtgttcattgccctgttttagagctagaaatagcaagttaaaataaggctagtccgttatcaacttgaaaaagtggcaccgagtcggtgcgttccagccaccggcccagggcaatgaac

SEQ ID NO: 1676 - RNA, 125 nt, synthetic construct
  source 1..125: mol_type = other RNA
ctctttgtgttcattgccctgttttagagctagaaatagcaagttaaaataaggctagtccgttatcaacttgaaaaagtggcaccgagtcggtgcttccagccaccggcccagggcaatgaaca

SEQ ID NO: 1677 - RNA, 126 nt, synthetic construct
  source 1..126: mol_type = other RNA
ctctttgtgttcattgccctgttttagagctagaaatagcaagttaaaataaggctagtccgttatcaacttgaaaaagtggcaccgagtcggtgctccagccaccggcccagggcaatgaacaca

SEQ ID NO: 1678 - RNA, 126 nt, synthetic construct
  source 1..126: mol_type = other RNA
gctctttgtgttcattgccctgttttagagctagaaatagcaagttaaaataaggctagtccgttatcaacttgaaaaagtggcaccgagtcggtgcgccaccggcccagggcaatgaattttttt

SEQ ID NO: 1679 - RNA, 126 nt, synthetic construct
  source 1..126: mol_type = other RNA
ctctttgtgttcattgccctgttttagagctagaaatagcaagttaaaataaggctagtccgttatcaacttgaaaaagtggcaccgagtcggtgcttccagccaccggcccagggcaatgaacac

SEQ ID NO: 1680 - RNA, 126 nt, synthetic construct
  source 1..126: mol_type = other RNA
gctctttgtgttcattgccctgttttagagctagaaatagcaagttaaaataaggctagtccgttatcaacttgaaaaagtggcaccgagtcggtgcaccggcccagggcaatgaacacttttttt

SEQ ID NO: 1681 - RNA, 126 nt, synthetic construct
  source 1..126: mol_type = other RNA
ctctttgtgttcattgccctgttttagagctagaaatagcaagttaaaataaggctagtccgttatcaacttgaaaaagtggcaccgagtcggtgcgttccagccaccggcccagggcaatgaaca

SEQ ID NO: 1682 - RNA, 127 nt, synthetic construct
  source 1..127: mol_type = other RNA
ctctttgtgttcattgccctgttttagagctagaaatagcaagttaaaataaggctagtccgttatcaacttgaaaaagtggcaccgagtcggtgctccagccaccggcccagggcaatgaacacaa

SEQ ID NO: 1683 - RNA, 127 nt, synthetic construct
  source 1..127: mol_type = other RNA
gctctttgtgttcattgccctgttttagagctagaaatagcaagttaaaataaggctagtccgttatcaacttgaaaaagtggcaccgagtcggtgcagccaccggcccagggcaatgaattttttt

SEQ ID NO: 1684 - RNA, 127 nt, synthetic construct
  source 1..127: mol_type = other RNA
gctctttgtgttcattgccctgttttagagctagaaatagcaagttaaaataaggctagtccgttatcaacttgaaaaagtggcaccgagtcggtgcgccaccggcccagggcaatgaacttttttt

SEQ ID NO: 1685 - RNA, 127 nt, synthetic construct
  source 1..127: mol_type = other RNA
ctctttgtgttcattgccctgttttagagctagaaatagcaagttaaaataaggctagtccgttatcaacttgaaaaagtggcaccgagtcggtgcgttccagccaccggcccagggcaatgaacac

SEQ ID NO: 1686 - RNA, 127 nt, synthetic construct
  source 1..127: mol_type = other RNA
ctctttgtgttcattgccctgttttagagctagaaatagcaagttaaaataaggctagtccgttatcaacttgaaaaagtggcaccgagtcggtgcttccagccaccggcccagggcaatgaacaca

SEQ ID NO: 1687 - RNA, 127 nt, synthetic construct
  source 1..127: mol_type = other RNA
gctctttgtgttcattgccctgttttagagctagaaatagcaagttaaaataaggctagtccgttatcaacttgaaaaagtggcaccgagtcggtgcaccggcccagggcaatgaacacattttttt

SEQ ID NO: 1688 - RNA, 128 nt, synthetic construct
  source 1..128: mol_type = other RNA
gctctttgtgttcattgccctgttttagagctagaaatagcaagttaaaataaggctagtccgttatcaacttgaaaaagtggcaccgagtcggtgcagccaccggcccagggcaatgaacttttttt

SEQ ID NO: 1689 - RNA, 128 nt, synthetic construct
  source 1..128: mol_type = other RNA
gctctttgtgttcattgccctgttttagagctagaaatagcaagttaaaataaggctagtccgttatcaacttgaaaaagtggcaccgagtcggtgcaccggcccagggcaatgaacacaattttttt

SEQ ID NO: 1690 - RNA, 128 nt, synthetic construct
  source 1..128: mol_type = other RNA
ctctttgtgttcattgccctgttttagagctagaaatagcaagttaaaataaggctagtccgttatcaacttgaaaaagtggcaccgagtcggtgcttccagccaccggcccagggcaatgaacacaa

SEQ ID NO: 1691 - RNA, 128 nt, synthetic construct
  source 1..128: mol_type = other RNA
ctctttgtgttcattgccctgttttagagctagaaatagcaagttaaaataaggctagtccgttatcaacttgaaaaagtggcaccgagtcggtgcgttccagccaccggcccagggcaatgaacaca

SEQ ID NO: 1692 - RNA, 128 nt, synthetic construct
  source 1..128: mol_type = other RNA
gctctttgtgttcattgccctgttttagagctagaaatagcaagttaaaataaggctagtccgttatcaacttgaaaaagtggcaccgagtcggtgcgccaccggcccagggcaatgaacattttttt

SEQ ID NO: 1693 - RNA, 128 nt, synthetic construct
  source 1..128: mol_type = other RNA
ctctttgtgttcattgccctgttttagagctagaaatagcaagttaaaataaggctagtccgttatcaacttgaaaaagtggcaccgagtcggtgctccagccaccggcccagggcaatgaacacaaa

SEQ ID NO: 1694 - RNA, 129 nt, synthetic construct
  source 1..129: mol_type = other RNA
gctctttgtgttcattgccctgttttagagctagaaatagcaagttaaaataaggctagtccgttatcaacttgaaaaagtggcaccgagtcggtgcagccaccggcccagggcaatgaacattttttt

SEQ ID NO: 1695 - RNA, 129 nt, synthetic construct
  source 1..129: mol_type = other RNA
ctctttgtgttcattgccctgttttagagctagaaatagcaagttaaaataaggctagtccgttatcaacttgaaaaagtggcaccgagtcggtgcgttccagccaccggcccagggcaatgaacacaa

SEQ ID NO: 1696 - RNA, 129 nt, synthetic construct
  source 1..129: mol_type = other RNA
gctctttgtgttcattgccctgttttagagctagaaatagcaagttaaaataaggctagtccgttatcaacttgaaaaagtggcaccgagtcggtgcgccaccggcccagggcaatgaacacttttttt

SEQ ID NO: 1697 - RNA, 129 nt, synthetic construct
  source 1..129: mol_type = other RNA
gctctttgtgttcattgccctgttttagagctagaaatagcaagttaaaataaggctagtccgttatcaacttgaaaaagtggcaccgagtcggtgcaccggcccagggcaatgaacacaaattttttt

SEQ ID NO: 1698 - RNA, 129 nt, synthetic construct
  source 1..129: mol_type = other RNA
ctctttgtgttcattgccctgttttagagctagaaatagcaagttaaaataaggctagtccgttatcaacttgaaaaagtggcaccgagtcggtgcttccagccaccggcccagggcaatgaacacaaa

SEQ ID NO: 1699 - RNA, 130 nt, synthetic construct
  source 1..130: mol_type = other RNA
ctctttgtgttcattgccctgttttagagctagaaatagcaagttaaaataaggctagtccgttatcaacttgaaaaagtggcaccgagtcggtgcgttccagccaccggcccagggcaatgaacacaaa

SEQ ID NO: 1700 - RNA, 130 nt, synthetic construct
  source 1..130: mol_type = other RNA
gctctttgtgttcattgccctgttttagagctagaaatagcaagttaaaataaggctagtccgttatcaacttgaaaaagtggcaccgagtcggtgcagccaccggcccagggcaatgaacacttttttt

SEQ ID NO: 1701 - RNA, 130 nt, synthetic construct
  source 1..130: mol_type = other RNA
gctctttgtgttcattgccctgttttagagctagaaatagcaagttaaaataaggctagtccgttatcaacttgaaaaagtggcaccgagtcggtgctccagccaccggcccagggcaatgaattttttt

SEQ ID NO: 1702 - RNA, 130 nt, synthetic construct
  source 1..130: mol_type = other RNA
gctctttgtgttcattgccctgttttagagctagaaatagcaagttaaaataaggctagtccgttatcaacttgaaaaagtggcaccgagtcggtgcgccaccggcccagggcaatgaacacattttttt

SEQ ID NO: 1703 - RNA, 131 nt, synthetic construct
  source 1..131: mol_type = other RNA
gctctttgtgttcattgccctgttttagagctagaaatagcaagttaaaataaggctagtccgttatcaacttgaaaaagtggcaccgagtcggtgcgccaccggcccagggcaatgaacacaattttttt

SEQ ID NO: 1704 - RNA, 131 nt, synthetic construct
  source 1..131: mol_type = other RNA
gctctttgtgttcattgccctgttttagagctagaaatagcaagttaaaataaggctagtccgttatcaacttgaaaaagtggcaccgagtcggtgcagccaccggcccagggcaatgaacacattttttt

SEQ ID NO: 1705 - RNA, 131 nt, synthetic construct
  source 1..131: mol_type = other RNA
gctctttgtgttcattgccctgttttagagctagaaatagcaagttaaaataaggctagtccgttatcaacttgaaaaagtggcaccgagtcggtgcttccagccaccggcccagggcaatgaattttttt

SEQ ID NO: 1706 - RNA, 131 nt, synthetic construct
  source 1..131: mol_type = other RNA
gctctttgtgttcattgccctgttttagagctagaaatagcaagttaaaataaggctagtccgttatcaacttgaaaaagtggcaccgagtcggtgctccagccaccggcccagggcaatgaacttttttt

SEQ ID NO: 1707 - RNA, 132 nt, synthetic construct
  source 1..132: mol_type = other RNA
gctctttgtgttcattgccctgttttagagctagaaatagcaagttaaaataaggctagtccgttatcaacttgaaaaagtggcaccgagtcggtgcttccagccaccggcccagggcaatgaacttttttt

SEQ ID NO: 1708 - RNA, 132 nt, synthetic construct
  source 1..132: mol_type = other RNA
gctctttgtgttcattgccctgttttagagctagaaatagcaagttaaaataaggctagtccgttatcaacttgaaaaagtggcaccgagtcggtgcagccaccggcccagggcaatgaacacaattttttt

SEQ ID NO: 1709 - RNA, 132 nt, synthetic construct
  source 1..132: mol_type = other RNA
gctctttgtgttcattgccctgttttagagctagaaatagcaagttaaaataaggctagtccgttatcaacttgaaaaagtggcaccgagtcggtgctccagccaccggcccagggcaatgaacattttttt

SEQ ID NO: 1710 - RNA, 132 nt, synthetic construct
  source 1..132: mol_type = other RNA
gctctttgtgttcattgccctgttttagagctagaaatagcaagttaaaataaggctagtccgttatcaacttgaaaaagtggcaccgagtcggtgcgttccagccaccggcccagggcaatgaattttttt

SEQ ID NO: 1711 - RNA, 132 nt, synthetic construct
  source 1..132: mol_type = other RNA
gctctttgtgttcattgccctgttttagagctagaaatagcaagttaaaataaggctagtccgttatcaacttgaaaaagtggcaccgagtcggtgcgccaccggcccagggcaatgaacacaaattttttt

SEQ ID NO: 1712 - RNA, 133 nt, synthetic construct
  source 1..133: mol_type = other RNA
gctctttgtgttcattgccctgttttagagctagaaatagcaagttaaaataaggctagtccgttatcaacttgaaaaagtggcaccgagtcggtgctccagccaccggcccagggcaatgaacacttttttt

SEQ ID NO: 1713 - RNA, 133 nt, synthetic construct
  source 1..133: mol_type = other RNA
gctctttgtgttcattgccctgttttagagctagaaatagcaagttaaaataaggctagtccgttatcaacttgaaaaagtggcaccgagtcggtgcgttccagccaccggcccagggcaatgaacttttttt

SEQ ID NO: 1714 - RNA, 133 nt, synthetic construct
  source 1..133: mol_type = other RNA
gctctttgtgttcattgccctgttttagagctagaaatagcaagttaaaataaggctagtccgttatcaacttgaaaaagtggcaccgagtcggtgcagccaccggcccagggcaatgaacacaaattttttt

SEQ ID NO: 1715 - RNA, 133 nt, synthetic construct
  source 1..133: mol_type = other RNA
gctctttgtgttcattgccctgttttagagctagaaatagcaagttaaaataaggctagtccgttatcaacttgaaaaagtggcaccgagtcggtgcttccagccaccggcccagggcaatgaacattttttt

SEQ ID NO: 1716 - RNA, 134 nt, synthetic construct
  source 1..134: mol_type = other RNA
gctctttgtgttcattgccctgttttagagctagaaatagcaagttaaaataaggctagtccgttatcaacttgaaaaagtggcaccgagtcggtgctccagccaccggcccagggcaatgaacacattttttt

SEQ ID NO: 1717 - RNA, 134 nt, synthetic construct
  source 1..134: mol_type = other RNA
gctctttgtgttcattgccctgttttagagctagaaatagcaagttaaaataaggctagtccgttatcaacttgaaaaagtggcaccgagtcggtgcgttccagccaccggcccagggcaatgaacattttttt

SEQ ID NO: 1718 - RNA, 134 nt, synthetic construct
  source 1..134: mol_type = other RNA
gctctttgtgttcattgccctgttttagagctagaaatagcaagttaaaataaggctagtccgttatcaacttgaaaaagtggcaccgagtcggtgcttccagccaccggcccagggcaatgaacacttttttt

SEQ ID NO: 1719 - RNA, 135 nt, synthetic construct
  source 1..135: mol_type = other RNA
gctctttgtgttcattgccctgttttagagctagaaatagcaagttaaaataaggctagtccgttatcaacttgaaaaagtggcaccgagtcggtgctccagccaccggcccagggcaatgaacacaattttttt

SEQ ID NO: 1720 - RNA, 135 nt, synthetic construct
  source 1..135: mol_type = other RNA
gctctttgtgttcattgccctgttttagagctagaaatagcaagttaaaataaggctagtccgttatcaacttgaaaaagtggcaccgagtcggtgcgttccagccaccggcccagggcaatgaacacttttttt

SEQ ID NO: 1721 - RNA, 135 nt, synthetic construct
  source 1..135: mol_type = other RNA
gctctttgtgttcattgccctgttttagagctagaaatagcaagttaaaataaggctagtccgttatcaacttgaaaaagtggcaccgagtcggtgcttccagccaccggcccagggcaatgaacacattttttt

SEQ ID NO: 1722 - RNA, 136 nt, synthetic construct
  source 1..136: mol_type = other RNA
gctctttgtgttcattgccctgttttagagctagaaatagcaagttaaaataaggctagtccgttatcaacttgaaaaagtggcaccgagtcggtgctccagccaccggcccagggcaatgaacacaaattttttt

SEQ ID NO: 1723 - RNA, 136 nt, synthetic construct
  source 1..136: mol_type = other RNA
gctctttgtgttcattgccctgttttagagctagaaatagcaagttaaaataaggctagtccgttatcaacttgaaaaagtggcaccgagtcggtgcttccagccaccggcccagggcaatgaacacaattttttt

SEQ ID NO: 1724 - RNA, 136 nt, synthetic construct
  source 1..136: mol_type = other RNA
gctctttgtgttcattgccctgttttagagctagaaatagcaagttaaaataaggctagtccgttatcaacttgaaaaagtggcaccgagtcggtgcgttccagccaccggcccagggcaatgaacacattttttt

SEQ ID NO: 1725 - RNA, 137 nt, synthetic construct
  source 1..137: mol_type = other RNA
gctctttgtgttcattgccctgttttagagctagaaatagcaagttaaaataaggctagtccgttatcaacttgaaaaagtggcaccgagtcggtgcttccagccaccggcccagggcaatgaacacaaattttttt

SEQ ID NO: 1726 - RNA, 137 nt, synthetic construct
  source 1..137: mol_type = other RNA
gctctttgtgttcattgccctgttttagagctagaaatagcaagttaaaataaggctagtccgttatcaacttgaaaaagtggcaccgagtcggtgcgttccagccaccggcccagggcaatgaacacaattttttt

SEQ ID NO: 1727 - RNA, 138 nt, synthetic construct
  source 1..138: mol_type = other RNA
gctctttgtgttcattgccctgttttagagctagaaatagcaagttaaaataaggctagtccgttatcaacttgaaaaagtggcaccgagtcggtgcgttccagccaccggcccagggcaatgaacacaaattttttt

SEQ ID NO: 1728 - RNA, 16 nt, synthetic construct
  source 1..16: mol_type = other RNA
cattgccctgggcctg

SEQ ID NO: 1729 - RNA, 17 nt, synthetic construct
  source 1..17: mol_type = other RNA
tcattgccctgggcctg

SEQ ID NO: 1730 - RNA, 18 nt, synthetic construct
  source 1..18: mol_type = other RNA
ttcattgccctgggcctg

SEQ ID NO: 1731 - RNA, 19 nt, synthetic construct
  source 1..19: mol_type = other RNA
gttcattgccctgggcctg

SEQ ID NO: 1732 - RNA, 20 nt, synthetic construct
  source 1..20: mol_type = other RNA
tgttcattgccctgggcctg

SEQ ID NO: 1733 - RNA, 21 nt, synthetic construct
  source 1..21: mol_type = other RNA
gtgttcattgccctgggcctg

SEQ ID NO: 1734 - RNA, 22 nt, synthetic construct
  source 1..22: mol_type = other RNA
tgtgttcattgccctgggcctg

SEQ ID NO: 1735-1741 - skipped (7 entries)

SEQ ID NO: 1742 - RNA, 10 nt, synthetic construct
  source 1..10: mol_type = other RNA
gcccagggca

SEQ ID NO: 1743 - RNA, 11 nt, synthetic construct
  source 1..11: mol_type = other RNA
gcccagggcaa

SEQ ID NO: 1744 - RNA, 12 nt, synthetic construct
  source 1..12: mol_type = other RNA
gcccagggcaat

SEQ ID NO: 1745 - RNA, 13 nt, synthetic construct
  source 1..13: mol_type = other RNA
gcccagggcaatg

SEQ ID NO: 1746 - RNA, 14 nt, synthetic construct
  source 1..14: mol_type = other RNA
gcccagggcaatga

SEQ ID NO: 1747 - RNA, 15 nt, synthetic construct
  source 1..15: mol_type = other RNA
gcccagggcaatgaa

SEQ ID NO: 1748 - RNA, 16 nt, synthetic construct
  source 1..16: mol_type = other RNA
gcccagggcaatgaac

SEQ ID NO: 1749 - RNA, 17 nt, synthetic construct
  source 1..17: mol_type = other RNA
gcccagggcaatgaaca

SEQ ID NO: 1750 - RNA, 18 nt, synthetic construct
  source 1..18: mol_type = other RNA
gcccagggcaatgaacac

SEQ ID NO: 1751 - RNA, 19 nt, synthetic construct
  source 1..19: mol_type = other RNA
gcccagggcaatgaacaca

SEQ ID NO: 1752 - RNA, 10 nt, synthetic construct
  source 1..10: mol_type = other RNA
ccagccaccg

SEQ ID NO: 1753 - RNA, 11 nt, synthetic construct
  source 1..11: mol_type = other RNA
tccagccaccg

SEQ ID NO: 1754 - RNA, 12 nt, synthetic construct
  source 1..12: mol_type = other RNA
ttccagccaccg

SEQ ID NO: 1755 - RNA, 13 nt, synthetic construct
  source 1..13: mol_type = other RNA
gttccagccaccg

SEQ ID NO: 1756 - RNA, 14 nt, synthetic construct
  source 1..14: mol_type = other RNA
tgttccagccaccg

SEQ ID NO: 1757 - RNA, 15 nt, synthetic construct
  source 1..15: mol_type = other RNA
gtgttccagccaccg

SEQ ID NO: 1758 - RNA, 16 nt, synthetic construct
  source 1..16: mol_type = other RNA
agtgttccagccaccg

SEQ ID NO: 1759 - RNA, 17 nt, synthetic construct
  source 1..17: mol_type = other RNA
aagtgttccagccaccg

SEQ ID NO: 1760 - RNA, 18 nt, synthetic construct
  source 1..18: mol_type = other RNA
caagtgttccagccaccg

SEQ ID NO: 1761 - RNA, 19 nt, synthetic construct
  source 1..19: mol_type = other RNA
ccaagtgttccagccaccg

SEQ ID NO: 1762 - RNA, 20 nt, synthetic construct
  source 1..20: mol_type = other RNA
gccaagtgttccagccaccg

SEQ ID NO: 1763 - RNA, 21 nt, synthetic construct
  source 1..21: mol_type = other RNA
tgccaagtgttccagccaccg

SEQ ID NO: 1764 - RNA, 22 nt, synthetic construct
  source 1..22: mol_type = other RNA
ttgccaagtgttccagccaccg

SEQ ID NO: 1765 - RNA, 23 nt, synthetic construct
  source 1..23: mol_type = other RNA
tttgccaagtgttccagccaccg

SEQ ID NO: 1766 - RNA, 24 nt, synthetic construct
  source 1..24: mol_type = other RNA
ctttgccaagtgttccagccaccg

SEQ ID NO: 1767 - RNA, 25 nt, synthetic construct
  source 1..25: mol_type = other RNA
cctttgccaagtgttccagccaccg

SEQ ID NO: 1768 - RNA, 26 nt, synthetic construct
  source 1..26: mol_type = other RNA
acctttgccaagtgttccagccaccg

SEQ ID NO: 1769 - RNA, 27 nt, synthetic construct
  source 1..27: mol_type = other RNA
tacctttgccaagtgttccagccaccg

SEQ ID NO: 1770 - RNA, 28 nt, synthetic construct
  source 1..28: mol_type = other RNA
ttacctttgccaagtgttccagccaccg

SEQ ID NO: 1771 - RNA, 29 nt, synthetic construct
  source 1..29: mol_type = other RNA
gttacctttgccaagtgttccagccaccg

SEQ ID NO: 1772 - RNA, 30 nt, synthetic construct
  source 1..30: mol_type = other RNA
tgttacctttgccaagtgttccagccaccg

SEQ ID NO: 1773 - RNA, 31 nt, synthetic construct
  source 1..31: mol_type = other RNA
ctgttacctttgccaagtgttccagccaccg

SEQ ID NO: 1774 - RNA, 32 nt, synthetic construct
  source 1..32: mol_type = other RNA
gctgttacctttgccaagtgttccagccaccg

SEQ ID NO: 1775 - RNA, 33 nt, synthetic construct
  source 1..33: mol_type = other RNA
tgctgttacctttgccaagtgttccagccaccg

SEQ ID NO: 1776 - RNA, 34 nt, synthetic construct
  source 1..34: mol_type = other RNA
ctgctgttacctttgccaagtgttccagccaccg

SEQ ID NO: 1777 - RNA, 35 nt, synthetic construct
  source 1..35: mol_type = other RNA
gctgctgttacctttgccaagtgttccagccaccg

SEQ ID NO: 1778 - RNA, 36 nt, synthetic construct
  source 1..36: mol_type = other RNA
agctgctgttacctttgccaagtgttccagccaccg

SEQ ID NO: 1779 - RNA, 37 nt, synthetic construct
  source 1..37: mol_type = other RNA
aagctgctgttacctttgccaagtgttccagccaccg

SEQ ID NO: 1780 - RNA, 38 nt, synthetic construct
  source 1..38: mol_type = other RNA
gaagctgctgttacctttgccaagtgttccagccaccg

SEQ ID NO: 1781 - RNA, 39 nt, synthetic construct
  source 1..39: mol_type = other RNA
tgaagctgctgttacctttgccaagtgttccagccaccg

SEQ ID NO: 1782 - RNA, 40 nt, synthetic construct
  source 1..40: mol_type = other RNA
ctgaagctgctgttacctttgccaagtgttccagccaccg

SEQ ID NO: 1783 - RNA, 41 nt, synthetic construct
  source 1..41: mol_type = other RNA
cctgaagctgctgttacctttgccaagtgttccagccaccg

SEQ ID NO: 1784 - RNA, 42 nt, synthetic construct
  source 1..42: mol_type = other RNA
acctgaagctgctgttacctttgccaagtgttccagccaccg

SEQ ID NO: 1785 - RNA, 43 nt, synthetic construct
  source 1..43: mol_type = other RNA
aacctgaagctgctgttacctttgccaagtgttccagccaccg

SEQ ID NO: 1786 - RNA, 44 nt, synthetic construct
  source 1..44: mol_type = other RNA
gaacctgaagctgctgttacctttgccaagtgttccagccaccg

SEQ ID NO: 1787 - RNA, 45 nt, synthetic construct
  source 1..45: mol_type = other RNA
tgaacctgaagctgctgttacctttgccaagtgttccagccaccg

SEQ ID NO: 1788 - RNA, 46 nt, synthetic construct
  source 1..46: mol_type = other RNA
ctgaacctgaagctgctgttacctttgccaagtgttccagccaccg

SEQ ID NO: 1789 - RNA, 47 nt, synthetic construct
  source 1..47: mol_type = other RNA
tctgaacctgaagctgctgttacctttgccaagtgttccagccaccg

SEQ ID NO: 1790 - RNA, 48 nt, synthetic construct
  source 1..48: mol_type = other RNA
ttctgaacctgaagctgctgttacctttgccaagtgttccagccaccg

SEQ ID NO: 1791 - RNA, 49 nt, synthetic construct
  source 1..49: mol_type = other RNA
tttctgaacctgaagctgctgttacctttgccaagtgttccagccaccg

SEQ ID NO: 1792 - RNA, 50 nt, synthetic construct
  source 1..50: mol_type = other RNA
ttttctgaacctgaagctgctgttacctttgccaagtgttccagccaccg

SEQ ID NO: 1793 - RNA, 51 nt, synthetic construct
  source 1..51: mol_type = other RNA
cttttctgaacctgaagctgctgttacctttgccaagtgttccagccaccg

SEQ ID NO: 1794 - RNA, 52 nt, synthetic construct
  source 1..52: mol_type = other RNA
tcttttctgaacctgaagctgctgttacctttgccaagtgttccagccaccg

SEQ ID NO: 1795 - RNA, 53 nt, synthetic construct
  source 1..53: mol_type = other RNA
ctcttttctgaacctgaagctgctgttacctttgccaagtgttccagccaccg

SEQ ID NO: 1796 - RNA, 54 nt, synthetic construct
  source 1..54: mol_type = other RNA
gctcttttctgaacctgaagctgctgttacctttgccaagtgttccagccaccg

SEQ ID NO: 1797 - RNA, 55 nt, synthetic construct
  source 1..55: mol_type = other RNA
agctcttttctgaacctgaagctgctgttacctttgccaagtgttccagccaccg

SEQ ID NO: 1798 - RNA, 56 nt, synthetic construct
  source 1..56: mol_type = other RNA
cagctcttttctgaacctgaagctgctgttacctttgccaagtgttccagccaccg

SEQ ID NO: 1799 - RNA, 57 nt, synthetic construct
  source 1..57: mol_type = other RNA
gcagctcttttctgaacctgaagctgctgttacctttgccaagtgttccagccaccg

SEQ ID NO: 1800 - RNA, 58 nt, synthetic construct
  source 1..58: mol_type = other RNA
agcagctcttttctgaacctgaagctgctgttacctttgccaagtgttccagccaccg

SEQ ID NO: 1801 - RNA, 59 nt, synthetic construct
  source 1..59: mol_type = other RNA
gagcagctcttttctgaacctgaagctgctgttacctttgccaagtgttccagccaccg

SEQ ID NO: 1802 - RNA, 60 nt, synthetic construct
  source 1..60: mol_type = other RNA
ggagcagctcttttctgaacctgaagctgctgttacctttgccaagtgttccagccaccg

SEQ ID NO: 1803 - RNA, 61 nt, synthetic construct
  source 1..61: mol_type = other RNA
aggagcagctcttttctgaacctgaagctgctgttacctttgccaagtgttccagccaccg

SEQ ID NO: 1804 - RNA, 62 nt, synthetic construct
  source 1..62: mol_type = other RNA
aaggagcagctcttttctgaacctgaagctgctgttacctttgccaagtgttccagccaccg

SEQ ID NO: 1805 - RNA, 63 nt, synthetic construct
  source 1..63: mol_type = other RNA
gaaggagcagctcttttctgaacctgaagctgctgttacctttgccaagtgttccagccaccg

SEQ ID NO: 1806 - RNA, 64 nt, synthetic construct
  source 1..64: mol_type = other RNA
tgaaggagcagctcttttctgaacctgaagctgctgttacctttgccaagtgttccagccaccg

SEQ ID NO: 1807 - RNA, 65 nt, synthetic construct
  source 1..65: mol_type = other RNA
ctgaaggagcagctcttttctgaacctgaagctgctgttacctttgccaagtgttccagccaccg

SEQ ID NO: 1808 - RNA, 66 nt, synthetic construct
  source 1..66: mol_type = other RNA
actgaaggagcagctcttttctgaacctgaagctgctgttacctttgccaagtgttccagccaccg

SEQ ID NO: 1809 - RNA, 67 nt, synthetic construct
  source 1..67: mol_type = other RNA
tactgaaggagcagctcttttctgaacctgaagctgctgttacctttgccaagtgttccagccaccg

SEQ ID NO: 1810 - RNA, 68 nt, synthetic construct
  source 1..68: mol_type = other RNA
ttactgaaggagcagctcttttctgaacctgaagctgctgttacctttgccaagtgttccagccaccg

SEQ ID NO: 1811 - RNA, 69 nt, synthetic construct
  source 1..69: mol_type = other RNA
tttactgaaggagcagctcttttctgaacctgaagctgctgttacctttgccaagtgttccagccaccg

SEQ ID NO: 1812 - RNA, 70 nt, synthetic construct
  source 1..70: mol_type = other RNA
gtttactgaaggagcagctcttttctgaacctgaagctgctgttacctttgccaagtgttccagccaccg

SEQ ID NO: 1813 - RNA, 71 nt, synthetic construct
  source 1..71: mol_type = other RNA
tgtttactgaaggagcagctcttttctgaacctgaagctgctgttacctttgccaagtgttccagccaccg

SEQ ID NO: 1814 - RNA, 72 nt, synthetic construct
  source 1..72: mol_type = other RNA
ttgtttactgaaggagcagctcttttctgaacctgaagctgctgttacctttgccaagtgttccagccaccg

SEQ ID NO: 1815 - RNA, 73 nt, synthetic construct
  source 1..73: mol_type = other RNA
tttgtttactgaaggagcagctcttttctgaacctgaagctgctgttacctttgccaagtgttccagccaccg

SEQ ID NO: 1816 - RNA, 74 nt, synthetic construct
  source 1..74: mol_type = other RNA
atttgtttactgaaggagcagctcttttctgaacctgaagctgctgttacctttgccaagtgttccagccaccg

SEQ ID NO: 1817 - RNA, 75 nt, synthetic construct
  source 1..75: mol_type = other RNA
gatttgtttactgaaggagcagctcttttctgaacctgaagctgctgttacctttgccaagtgttccagccaccg

SEQ ID NO: 1818 - RNA, 76 nt, synthetic construct
  source 1..76: mol_type = other RNA
agatttgtttactgaaggagcagctcttttctgaacctgaagctgctgttacctttgccaagtgttccagccaccg

SEQ ID NO: 1819 - RNA, 77 nt, synthetic construct
  source 1..77: mol_type = other RNA
gagatttgtttactgaaggagcagctcttttctgaacctgaagctgctgttacctttgccaagtgttccagccaccg

SEQ ID NO: 1820 - RNA, 78 nt, synthetic construct
  source 1..78: mol_type = other RNA
tgagatttgtttactgaaggagcagctcttttctgaacctgaagctgctgttacctttgccaagtgttccagccaccg

SEQ ID NO: 1821 - RNA, 79 nt, synthetic construct
  source 1..79: mol_type = other RNA
gtgagatttgtttactgaaggagcagctcttttctgaacctgaagctgctgttacctttgccaagtgttccagccaccg

SEQ ID NO: 1822 - RNA, 80 nt, synthetic construct
  source 1..80: mol_type = other RNA
agtgagatttgtttactgaaggagcagctcttttctgaacctgaagctgctgttacctttgccaagtgttccagccaccg

SEQ ID NO: 1823 - RNA, 81 nt, synthetic construct
  source 1..81: mol_type = other RNA
aagtgagatttgtttactgaaggagcagctcttttctgaacctgaagctgctgttacctttgccaagtgttccagccaccg

SEQ ID NO: 1824 - RNA, 82 nt, synthetic construct
  source 1..82: mol_type = other RNA
gaagtgagatttgtttactgaaggagcagctcttttctgaacctgaagctgctgttacctttgccaagtgttccagccaccg

SEQ ID NO: 1825 - RNA, 83 nt, synthetic construct
  source 1..83: mol_type = other RNA
ggaagtgagatttgtttactgaaggagcagctcttttctgaacctgaagctgctgttacctttgccaagtgttccagccaccg

SEQ ID NO: 1826 - RNA, 84 nt, synthetic construct
  source 1..84: mol_type = other RNA
aggaagtgagatttgtttactgaaggagcagctcttttctgaacctgaagctgctgttacctttgccaagtgttccagccaccg

SEQ ID NO: 1827 - RNA, 85 nt, synthetic construct
  source 1..85: mol_type = other RNA
gaggaagtgagatttgtttactgaaggagcagctcttttctgaacctgaagctgctgttacctttgccaagtgttccagccaccg

SEQ ID NO: 1828 - RNA, 86 nt, synthetic construct
  source 1..86: mol_type = other RNA
agaggaagtgagatttgtttactgaaggagcagctcttttctgaacctgaagctgctgttacctttgccaagtgttccagccaccg

SEQ ID NO: 1829 - RNA, 87 nt, synthetic construct
  source 1..87: mol_type = other RNA
cagaggaagtgagatttgtttactgaaggagcagctcttttctgaacctgaagctgctgttacctttgccaagtgttccagccaccg

SEQ ID NO: 1830 - RNA, 88 nt, synthetic construct
  source 1..88: mol_type = other RNA
tcagaggaagtgagatttgtttactgaaggagcagctcttttctgaacctgaagctgctgttacctttgccaagtgttccagccaccg

SEQ ID NO: 1831 - RNA, 89 nt, synthetic construct
  source 1..89: mol_type = other RNA
ttcagaggaagtgagatttgtttactgaaggagcagctcttttctgaacctgaagctgctgttacctttgccaagtgttccagccaccg

SEQ ID NO: 1832 - RNA, 90 nt, synthetic construct
  source 1..90: mol_type = other RNA
gttcagaggaagtgagatttgtttactgaaggagcagctcttttctgaacctgaagctgctgttacctttgccaagtgttccagccaccg

SEQ ID NO: 1833 - RNA, 91 nt, synthetic construct
  source 1..91: mol_type = other RNA
tgttcagaggaagtgagatttgtttactgaaggagcagctcttttctgaacctgaagctgctgttacctttgccaagtgttccagccaccg

SEQ ID NO: 1834 - RNA, 92 nt, synthetic construct
  source 1..92: mol_type = other RNA
gtgttcagaggaagtgagatttgtttactgaaggagcagctcttttctgaacctgaagctgctgttacctttgccaagtgttccagccaccg

SEQ ID NO: 1835 - RNA, 93 nt, synthetic construct
  source 1..93: mol_type = other RNA
ggtgttcagaggaagtgagatttgtttactgaaggagcagctcttttctgaacctgaagctgctgttacctttgccaagtgttccagccaccg

SEQ ID NO: 1836 - RNA, 94 nt, synthetic construct
  source 1..94: mol_type = other RNA
tggtgttcagaggaagtgagatttgtttactgaaggagcagctcttttctgaacctgaagctgctgttacctttgccaagtgttccagccaccg

SEQ ID NO: 1837 - RNA, 95 nt, synthetic construct
  source 1..95: mol_type = other RNA
atggtgttcagaggaagtgagatttgtttactgaaggagcagctcttttctgaacctgaagctgctgttacctttgccaagtgttccagccaccg

SEQ ID NO: 1838 - RNA, 96 nt, synthetic construct
  source 1..96: mol_type = other RNA
catggtgttcagaggaagtgagatttgtttactgaaggagcagctcttttctgaacctgaagctgctgttacctttgccaagtgttccagccaccg

SEQ ID NO: 1839 - RNA, 97 nt, synthetic construct
  source 1..97: mol_type = other RNA
acatggtgttcagaggaagtgagatttgtttactgaaggagcagctcttttctgaacctgaagctgctgttacctttgccaagtgttccagccaccg

SEQ ID NO: 1840 - RNA, 98 nt, synthetic construct
  source 1..98: mol_type = other RNA
aacatggtgttcagaggaagtgagatttgtttactgaaggagcagctcttttctgaacctgaagctgctgttacctttgccaagtgttccagccaccg

SEQ ID NO: 1841 - RNA, 99 nt, synthetic construct
  source 1..99: mol_type = other RNA
aaacatggtgttcagaggaagtgagatttgtttactgaaggagcagctcttttctgaacctgaagctgctgttacctttgccaagtgttccagccaccg

SEQ ID NO: 1842 - RNA, 100 nt, synthetic construct
  source 1..100: mol_type = other RNA
taaacatggtgttcagaggaagtgagatttgtttactgaaggagcagctcttttctgaacctgaagctgctgttacctttgccaagtgttccagccaccg

SEQ ID NO: 1843 - RNA, 20 nt, synthetic construct
  source 1..20: mol_type = other RNA
attagtaattctaaacatgg

SEQ ID NO: 1844 - RNA, 20 nt, synthetic construct
  source 1..20: mol_type = other RNA
taattagtaattctaaacat

SEQ ID NO: 1845 - RNA, 20 nt, synthetic construct
  source 1..20: mol_type = other RNA
ataattagtaattctaaaca

SEQ ID NO: 1846 - RNA, 115 nt, synthetic construct
  source 1..115: mol_type = other RNA
tgttcattgccctgggcctggttttagagctagaaatagcaagttaaaataaggctagtccgttatcaacttgaaaaagtggcaccgagtcggtgctccagccaccggcccaggg

SEQ ID NO: 1847 - RNA, 116 nt, synthetic construct
  source 1..116: mol_type = other RNA
tgttcattgccctgggcctggttttagagctagaaatagcaagttaaaataaggctagtccgttatcaacttgaaaaagtggcaccgagtcggtgcttccagccaccggcccaggg

SEQ ID NO: 1848 - RNA, 116 nt, synthetic construct
  source 1..116: mol_type = other RNA
tgttcattgccctgggcctggttttagagctagaaatagcaagttaaaataaggctagtccgttatcaacttgaaaaagtggcaccgagtcggtgctccagccaccggcccagggc

SEQ ID NO: 1849 - RNA, 117 nt, synthetic construct
  source 1..117: mol_type = other RNA
tgttcattgccctgggcctggttttagagctagaaatagcaagttaaaataaggctagtccgttatcaacttgaaaaagtggcaccgagtcggtgcgttccagccaccggcccaggg

SEQ ID NO: 1850 - RNA, 117 nt, synthetic construct
  source 1..117: mol_type = other RNA
tgttcattgccctgggcctggttttagagctagaaatagcaagttaaaataaggctagtccgttatcaacttgaaaaagtggcaccgagtcggtgctccagccaccggcccagggca

SEQ ID NO: 1851 - RNA, 117 nt, synthetic construct
  source 1..117: mol_type = other RNA
tgttcattgccctgggcctggttttagagctagaaatagcaagttaaaataaggctagtccgttatcaacttgaaaaagtggcaccgagtcggtgcttccagccaccggcccagggc

SEQ ID NO: 1852 - RNA, 118 nt, synthetic construct
  source 1..118: mol_type = other RNA
tgttcattgccctgggcctggttttagagctagaaatagcaagttaaaataaggctagtccgttatcaacttgaaaaagtggcaccgagtcggtgcgttccagccaccggcccagggc

SEQ ID NO: 1853 - RNA, 118 nt, synthetic construct
  source 1..118: mol_type = other RNA
tgttcattgccctgggcctggttttagagctagaaatagcaagttaaaataaggctagtccgttatcaacttgaaaaagtggcaccgagtcggtgctgttccagccaccggcccaggg

SEQ ID NO: 1854 - RNA, 118 nt, synthetic construct
  source 1..118: mol_type = other RNA
tgttcattgccctgggcctggttttagagctagaaatagcaagttaaaataaggctagtccgttatcaacttgaaaaagtggcaccgagtcggtgcttccagccaccggcccagggca

SEQ ID NO: 1855 - RNA, 118 nt, synthetic construct
  source 1..118: mol_type = other RNA
tgttcattgccctgggcctggttttagagctagaaatagcaagttaaaataaggctagtccgttatcaacttgaaaaagtggcaccgagtcggtgctccagccaccggcccagggcaa

SEQ ID NO: 1856 - RNA, 119 nt, synthetic construct
  source 1..119: mol_type = other RNA
tgttcattgccctgggcctggttttagagctagaaatagcaagttaaaataaggctagtccgttatcaacttgaaaaagtggcaccgagtcggtgctgttccagccaccggcccagggc

SEQ ID NO: 1857 - RNA, 119 nt, synthetic construct
  source 1..119: mol_type = other RNA
tgttcattgccctgggcctggttttagagctagaaatagcaagttaaaataaggctagtccgttatcaacttgaaaaagtggcaccgagtcggtgcttccagccaccggcccagggcaa

SEQ ID NO: 1858 - RNA, 119 nt, synthetic construct
  source 1..119: mol_type = other RNA
tgttcattgccctgggcctggttttagagctagaaatagcaagttaaaataaggctagtccgttatcaacttgaaaaagtggcaccgagtcggtgctccagccaccggcccagggcaat

SEQ ID NO: 1859 - RNA, 119 nt, synthetic construct
  source 1..119: mol_type = other RNA
tgttcattgccctgggcctggttttagagctagaaatagcaagttaaaataaggctagtccgttatcaacttgaaaaagtggcaccgagtcggtgcgtgttccagccaccggcccaggg

SEQ ID NO: 1860 - RNA, 119 nt, synthetic construct
  source 1..119: mol_type = other RNA
tgttcattgccctgggcctggttttagagctagaaatagcaagttaaaataaggctagtccgttatcaacttgaaaaagtggcaccgagtcggtgcgttccagccaccggcccagggca

SEQ ID NO: 1861 - RNA, 120 nt, synthetic construct
  source 1..120: mol_type = other RNA
tgttcattgccctgggcctggttttagagctagaaatagcaagttaaaataaggctagtccgttatcaacttgaaaaagtggcaccgagtcggtgctgttccagccaccggcccagggca

SEQ ID NO: 1862 - RNA, 120 nt, synthetic construct
  source 1..120: mol_type = other RNA
tgttcattgccctgggcctggttttagagctagaaatagcaagttaaaataaggctagtccgttatcaacttgaaaaagtggcaccgagtcggtgctccagccaccggcccagggcaatg

SEQ ID NO: 1863 - RNA, 120 nt, synthetic construct
  source 1..120: mol_type = other RNA
tgttcattgccctgggcctggttttagagctagaaatagcaagttaaaataaggctagtccgttatcaacttgaaaaagtggcaccgagtcggtgcagtgttccagccaccggcccaggg

SEQ ID NO: 1864 - RNA, 120 nt, synthetic construct
  source 1..120: mol_type = other RNA
tgttcattgccctgggcctggttttagagctagaaatagcaagttaaaataaggctagtccgttatcaacttgaaaaagtggcaccgagtcggtgcgtgttccagccaccggcccagggc

SEQ ID NO: 1865 - RNA, 120 nt, synthetic construct
  source 1..120: mol_type = other RNA
tgttcattgccctgggcctggttttagagctagaaatagcaagttaaaataaggctagtccgttatcaacttgaaaaagtggcaccgagtcggtgcgttccagccaccggcccagggcaa

SEQ ID NO: 1866 - RNA, 120 nt, synthetic construct
  source 1..120: mol_type = other RNA
tgttcattgccctgggcctggttttagagctagaaatagcaagttaaaataaggctagtccgttatcaacttgaaaaagtggcaccgagtcggtgcttccagccaccggcccagggcaat

SEQ ID NO: 1867 - RNA, 121 nt, synthetic construct
  source 1..121: mol_type = other RNA
tgttcattgccctgggcctggttttagagctagaaatagcaagttaaaataaggctagtccgttatcaacttgaaaaagtggcaccgagtcggtgcgttccagccaccggcccagggcaat

SEQ ID NO: 1868 - RNA, 121 nt, synthetic construct
  source 1..121: mol_type = other RNA
tgttcattgccctgggcctggttttagagctagaaatagcaagttaaaataaggctagtccgttatcaacttgaaaaagtggcaccgagtcggtgcgtgttccagccaccggcccagggca

SEQ ID NO: 1869 - RNA, 121 nt, synthetic construct
  source 1..121: mol_type = other RNA
tgttcattgccctgggcctggttttagagctagaaatagcaagttaaaataaggctagtccgttatcaacttgaaaaagtggcaccgagtcggtgcagtgttccagccaccggcccagggc

SEQ ID NO: 1870 - RNA, 121 nt, synthetic construct
  source 1..121: mol_type = other RNA
tgttcattgccctgggcctggttttagagctagaaatagcaagttaaaataaggctagtccgttatcaacttgaaaaagtggcaccgagtcggtgctccagccaccggcccagggcaatga

SEQ ID NO: 1871 - RNA, 121 nt, synthetic construct
  source 1..121: mol_type = other RNA
tgttcattgccctgggcctggttttagagctagaaatagcaagttaaaataaggctagtccgttatcaacttgaaaaagtggcaccgagtcggtgctgttccagccaccggcccagggcaa

SEQ ID NO: 1872 - RNA, 121 nt, synthetic construct
  source 1..121: mol_type = other RNA
tgttcattgccctgggcctggttttagagctagaaatagcaagttaaaataaggctagtccgttatcaacttgaaaaagtggcaccgagtcggtgcttccagccaccggcccagggcaatg

SEQ ID NO: 1873 - RNA, 121 nt, synthetic construct
  source 1..121: mol_type = other RNA
tgttcattgccctgggcctggttttagagctagaaatagcaagttaaaataaggctagtccgttatcaacttgaaaaagtggcaccgagtcggtgcaagtgttccagccaccggcccaggg

SEQ ID NO: 1874 - RNA, 122 nt, synthetic construct
  source 1..122: mol_type = other RNA
tgttcattgccctgggcctggttttagagctagaaatagcaagttaaaataaggctagtccgttatcaacttgaaaaagtggcaccgagtcggtgcaagtgttccagccaccggcccagggc

SEQ ID NO: 1875 - RNA, 122 nt, synthetic construct
  source 1..122: mol_type = other RNA
tgttcattgccctgggcctggttttagagctagaaatagcaagttaaaataaggctagtccgttatcaacttgaaaaagtggcaccgagtcggtgcgtgttccagccaccggcccagggcaa

SEQ ID NO: 1876 - RNA, 122 nt, synthetic construct
  source 1..122: mol_type = other RNA
tgttcattgccctgggcctggttttagagctagaaatagcaagttaaaataaggctagtccgttatcaacttgaaaaagtggcaccgagtcggtgcgttccagccaccggcccagggcaatg

SEQ ID NO: 1877 - RNA, 122 nt, synthetic construct
  source 1..122: mol_type = other RNA
tgttcattgccctgggcctggttttagagctagaaatagcaagttaaaataaggctagtccgttatcaacttgaaaaagtggcaccgagtcggtgcttccagccaccggcccagggcaatga

SEQ ID NO: 1878 - RNA, 122 nt, synthetic construct
  source 1..122: mol_type = other RNA
tgttcattgccctgggcctggttttagagctagaaatagcaagttaaaataaggctagtccgttatcaacttgaaaaagtggcaccgagtcggtgcagtgttccagccaccggcccagggca

SEQ ID NO: 1879 - RNA, 122 nt, synthetic construct
  source 1..122: mol_type = other RNA
tgttcattgccctgggcctggttttagagctagaaatagcaagttaaaataaggctagtccgttatcaacttgaaaaagtggcaccgagtcggtgctgttccagccaccggcccagggcaat

SEQ ID NO: 1880 - RNA, 123 nt, synthetic construct
  source 1..123: mol_type = other RNA
tgttcattgccctgggcctggttttagagctagaaatagcaagttaaaataaggctagtccgttatcaacttgaaaaagtggcaccgagtcggtgcgtgttccagccaccggcccagggcaat

SEQ ID NO: 1881 - RNA, 123 nt, synthetic construct
  source 1..123: mol_type = other RNA
tgttcattgccctgggcctggttttagagctagaaatagcaagttaaaataaggctagtccgttatcaacttgaaaaagtggcaccgagtcggtgcgttccagccaccggcccagggcaatga

SEQ ID NO: 1882 - RNA, 123 nt, synthetic construct
  source 1..123: mol_type = other RNA
tgttcattgccctgggcctggttttagagctagaaatagcaagttaaaataaggctagtccgttatcaacttgaaaaagtggcaccgagtcggtgctgttccagccaccggcccagggcaatg

SEQ ID NO: 1883 - RNA, 123 nt, synthetic construct
  source 1..123: mol_type = other RNA
gtgttcattgccctgggcctggttttagagctagaaatagcaagttaaaataaggctagtccgttatcaacttgaaaaagtggcaccgagtcggtgctccagccaccggcccagggttttttt

SEQ ID NO: 1884 - RNA, 123 nt, synthetic construct
  source 1..123: mol_type = other RNA
tgttcattgccctgggcctggttttagagctagaaatagcaagttaaaataaggctagtccgttatcaacttgaaaaagtggcaccgagtcggtgcaagtgttccagccaccggcccagggca

SEQ ID NO: 1885 - RNA, 123 nt, synthetic construct
  source 1..123: mol_type = other RNA
tgttcattgccctgggcctggttttagagctagaaatagcaagttaaaataaggctagtccgttatcaacttgaaaaagtggcaccgagtcggtgcagtgttccagccaccggcccagggcaa

SEQ ID NO: 1886 - RNA, 124 nt, synthetic construct
  source 1..124: mol_type = other RNA
tgttcattgccctgggcctggttttagagctagaaatagcaagttaaaataaggctagtccgttatcaacttgaaaaagtggcaccgagtcggtgcagtgttccagccaccggcccagggcaat

SEQ ID NO: 1887 - RNA, 124 nt, synthetic construct
  source 1..124: mol_type = other RNA
tgttcattgccctgggcctggttttagagctagaaatagcaagttaaaataaggctagtccgttatcaacttgaaaaagtggcaccgagtcggtgcgtgttccagccaccggcccagggcaatg

SEQ ID NO: 1888 - RNA, 124 nt, synthetic construct
  source 1..124: mol_type = other RNA
tgttcattgccctgggcctggttttagagctagaaatagcaagttaaaataaggctagtccgttatcaacttgaaaaagtggcaccgagtcggtgcgccaagtgttccagccaccggcccaggg

SEQ ID NO: 1889 - RNA, 124 nt, synthetic construct
  source 1..124: mol_type = other RNA
tgttcattgccctgggcctggttttagagctagaaatagcaagttaaaataaggctagtccgttatcaacttgaaaaagtggcaccgagtcggtgctgttccagccaccggcccagggcaatga

SEQ ID NO: 1890 - RNA, 124 nt, synthetic construct
  source 1..124: mol_type = other RNA
gtgttcattgccctgggcctggttttagagctagaaatagcaagttaaaataaggctagtccgttatcaacttgaaaaagtggcaccgagtcggtgcttccagccaccggcccagggttttttt

SEQ ID NO: 1891 - RNA, 124 nt, synthetic construct
  source 1..124: mol_type = other RNA
gtgttcattgccctgggcctggttttagagctagaaatagcaagttaaaataaggctagtccgttatcaacttgaaaaagtggcaccgagtcggtgctccagccaccggcccagggcttttttt

SEQ ID NO: 1892 - RNA, 124 nt, synthetic construct
  source 1..124: mol_type = other RNA
tgttcattgccctgggcctggttttagagctagaaatagcaagttaaaataaggctagtccgttatcaacttgaaaaagtggcaccgagtcggtgcaagtgttccagccaccggcccagggcaa

SEQ ID NO: 1893 - RNA, 125 nt, synthetic construct
  source 1..125: mol_type = other RNA
gtgttcattgccctgggcctggttttagagctagaaatagcaagttaaaataaggctagtccgttatcaacttgaaaaagtggcaccgagtcggtgctccagccaccggcccagggcattttttt

SEQ ID NO: 1894 - RNA, 125 nt, synthetic construct
  source 1..125: mol_type = other RNA
tgttcattgccctgggcctggttttagagctagaaatagcaagttaaaataaggctagtccgttatcaacttgaaaaagtggcaccgagtcggtgcagtgttccagccaccggcccagggcaatg

SEQ ID NO: 1895 - RNA, 125 nt, synthetic construct
  source 1..125: mol_type = other RNA
tgttcattgccctgggcctggttttagagctagaaatagcaagttaaaataaggctagtccgttatcaacttgaaaaagtggcaccgagtcggtgcaagtgttccagccaccggcccagggcaat

SEQ ID NO: 1896 - RNA, 125 nt, synthetic construct
  source 1..125: mol_type = other RNA
gtgttcattgccctgggcctggttttagagctagaaatagcaagttaaaataaggctagtccgttatcaacttgaaaaagtggcaccgagtcggtgcgttccagccaccggcccagggttttttt

SEQ ID NO: 1897 - RNA, 125 nt, synthetic construct
  source 1..125: mol_type = other RNA
gtgttcattgccctgggcctggttttagagctagaaatagcaagttaaaataaggctagtccgttatcaacttgaaaaagtggcaccgagtcggtgcttccagccaccggcccagggcttttttt

SEQ ID NO: 1898 - RNA, 125 nt, synthetic construct
  source 1..125: mol_type = other RNA
tgttcattgccctgggcctggttttagagctagaaatagcaagttaaaataaggctagtccgttatcaacttgaaaaagtggcaccgagtcggtgcgtgttccagccaccggcccagggcaatga

SEQ ID NO: 1899 - RNA, 125 nt, synthetic construct
  source 1..125: mol_type = other RNA
tgttcattgccctgggcctggttttagagctagaaatagcaagttaaaataaggctagtccgttatcaacttgaaaaagtggcaccgagtcggtgcgccaagtgttccagccaccggcccagggc

SEQ ID NO: 1900 - RNA, 126 nt, synthetic construct
  source 1..126: mol_type = other RNA
tgttcattgccctgggcctggttttagagctagaaatagcaagttaaaataaggctagtccgttatcaacttgaaaaagtggcaccgagtcggtgcagtgttccagccaccggcccagggcaatga

SEQ ID NO: 1901 - RNA, 126 nt, synthetic construct
  source 1..126: mol_type = other RNA
gtgttcattgccctgggcctggttttagagctagaaatagcaagttaaaataaggctagtccgttatcaacttgaaaaagtggcaccgagtcggtgcttccagccaccggcccagggcattttttt

SEQ ID NO: 1902 - RNA, 126 nt, synthetic construct
  source 1..126: mol_type = other RNA
gtgttcattgccctgggcctggttttagagctagaaatagcaagttaaaataaggctagtccgttatcaacttgaaaaagtggcaccgagtcggtgctccagccaccggcccagggcaattttttt

SEQ ID NO: 1903 - RNA, 126 nt, synthetic construct
  source 1..126: mol_type = other RNA
gtgttcattgccctgggcctggttttagagctagaaatagcaagttaaaataaggctagtccgttatcaacttgaaaaagtggcaccgagtcggtgcgttccagccaccggcccagggcttttttt

SEQ ID NO: 1904 - RNA, 126 nt, synthetic construct
  source 1..126: mol_type = other RNA
gtgttcattgccctgggcctggttttagagctagaaatagcaagttaaaataaggctagtccgttatcaacttgaaaaagtggcaccgagtcggtgctgttccagccaccggcccagggttttttt

SEQ ID NO: 1905 - RNA, 126 nt, synthetic construct
  source 1..126: mol_type = other RNA
tgttcattgccctgggcctggttttagagctagaaatagcaagttaaaataaggctagtccgttatcaacttgaaaaagtggcaccgagtcggtgcaagtgttccagccaccggcccagggcaatg

SEQ ID NO: 1906 - RNA, 126 nt, synthetic construct
  source 1..126: mol_type = other RNA
tgttcattgccctgggcctggttttagagctagaaatagcaagttaaaataaggctagtccgttatcaacttgaaaaagtggcaccgagtcggtgcgccaagtgttccagccaccggcccagggca

SEQ ID NO: 1907 - RNA, 127 nt, synthetic construct
  source 1..127: mol_type = other RNA
tgttcattgccctgggcctggttttagagctagaaatagcaagttaaaataaggctagtccgttatcaacttgaaaaagtggcaccgagtcggtgcaagtgttccagccaccggcccagggcaatga

SEQ ID NO: 1908 - RNA, 127 nt, synthetic construct
  source 1..127: mol_type = other RNA
gtgttcattgccctgggcctggttttagagctagaaatagcaagttaaaataaggctagtccgttatcaacttgaaaaagtggcaccgagtcggtgcttccagccaccggcccagggcaattttttt

SEQ ID NO: 1909 - RNA, 127 nt, synthetic construct
  source 1..127: mol_type = other RNA
gtgttcattgccctgggcctggttttagagctagaaatagcaagttaaaataaggctagtccgttatcaacttgaaaaagtggcaccgagtcggtgcgttccagccaccggcccagggcattttttt

SEQ ID NO: 1910 - RNA, 127 nt, synthetic construct
  source 1..127: mol_type = other RNA
gtgttcattgccctgggcctggttttagagctagaaatagcaagttaaaataaggctagtccgttatcaacttgaaaaagtggcaccgagtcggtgcgtgttccagccaccggcccagggttttttt

SEQ ID NO: 1911 - RNA, 127 nt, synthetic construct
  source 1..127: mol_type = other RNA
tgttcattgccctgggcctggttttagagctagaaatagcaagttaaaataaggctagtccgttatcaacttgaaaaagtggcaccgagtcggtgcgccaagtgttccagccaccggcccagggcaa

SEQ ID NO: 1912 - RNA, 127 nt, synthetic construct
  source 1..127: mol_type = other RNA
gtgttcattgccctgggcctggttttagagctagaaatagcaagttaaaataaggctagtccgttatcaacttgaaaaagtggcaccgagtcggtgctccagccaccggcccagggcaatttttttt

SEQ ID NO: 1913 - RNA, 127 nt, synthetic construct
  source 1..127: mol_type = other RNA
gtgttcattgccctgggcctggttttagagctagaaatagcaagttaaaataaggctagtccgttatcaacttgaaaaagtggcaccgagtcggtgctgttccagccaccggcccagggcttttttt

SEQ ID NO: 1914 - RNA, 128 nt, synthetic construct
  source 1..128: mol_type = other RNA
gtgttcattgccctgggcctggttttagagctagaaatagcaagttaaaataaggctagtccgttatcaacttgaaaaagtggcaccgagtcggtgcagtgttccagccaccggcccagggttttttt

SEQ ID NO: 1915 - RNA, 128 nt, synthetic construct
  source 1..128: mol_type = other RNA
gtgttcattgccctgggcctggttttagagctagaaatagcaagttaaaataaggctagtccgttatcaacttgaaaaagtggcaccgagtcggtgctgttccagccaccggcccagggcattttttt

SEQ ID NO: 1916 - RNA, 128 nt, synthetic construct
  source 1..128: mol_type = other RNA
gtgttcattgccctgggcctggttttagagctagaaatagcaagttaaaataaggctagtccgttatcaacttgaaaaagtggcaccgagtcggtgcgttccagccaccggcccagggcaattttttt

SEQ ID NO: 1917 - RNA, 128 nt, synthetic construct
  source 1..128: mol_type = other RNA
tgttcattgccctgggcctggttttagagctagaaatagcaagttaaaataaggctagtccgttatcaacttgaaaaagtggcaccgagtcggtgcgccaagtgttccagccaccggcccagggcaat

SEQ ID NO: 1918 - RNA, 128 nt, synthetic construct
  source 1..128: mol_type = other RNA
gtgttcattgccctgggcctggttttagagctagaaatagcaagttaaaataaggctagtccgttatcaacttgaaaaagtggcaccgagtcggtgcttccagccaccggcccagggcaatttttttt

SEQ ID NO: 1919 - RNA, 128 nt, synthetic construct
  source 1..128: mol_type = other RNA
gtgttcattgccctgggcctggttttagagctagaaatagcaagttaaaataaggctagtccgttatcaacttgaaaaagtggcaccgagtcggtgctccagccaccggcccagggcaatgttttttt

SEQ ID NO: 1920 - RNA, 128 nt, synthetic construct
  source 1..128: mol_type = other RNA
gtgttcattgccctgggcctggttttagagctagaaatagcaagttaaaataaggctagtccgttatcaacttgaaaaagtggcaccgagtcggtgcgtgttccagccaccggcccagggcttttttt

SEQ ID NO: 1921 - RNA, 129 nt, synthetic construct
  source 1..129: mol_type = other RNA
gtgttcattgccctgggcctggttttagagctagaaatagcaagttaaaataaggctagtccgttatcaacttgaaaaagtggcaccgagtcggtgcgttccagccaccggcccagggcaatttttttt

SEQ ID NO: 1922 - RNA, 129 nt, synthetic construct
  source 1..129: mol_type = other RNA
gtgttcattgccctgggcctggttttagagctagaaatagcaagttaaaataaggctagtccgttatcaacttgaaaaagtggcaccgagtcggtgctccagccaccggcccagggcaatgattttttt

SEQ ID NO: 1923 - RNA, 129 nt, synthetic construct
  source 1..129: mol_type = other RNA
tgttcattgccctgggcctggttttagagctagaaatagcaagttaaaataaggctagtccgttatcaacttgaaaaagtggcaccgagtcggtgcgccaagtgttccagccaccggcccagggcaatg

SEQ ID NO: 1924 - RNA, 129 nt, synthetic construct
  source 1..129: mol_type = other RNA
gtgttcattgccctgggcctggttttagagctagaaatagcaagttaaaataaggctagtccgttatcaacttgaaaaagtggcaccgagtcggtgcagtgttccagccaccggcccagggcttttttt

SEQ ID NO: 1925 - RNA, 129 nt, synthetic construct
  source 1..129: mol_type = other RNA
gtgttcattgccctgggcctggttttagagctagaaatagcaagttaaaataaggctagtccgttatcaacttgaaaaagtggcaccgagtcggtgcttccagccaccggcccagggcaatgttttttt

SEQ ID NO: 1926 - RNA, 129 nt, synthetic construct
  source 1..129: mol_type = other RNA
gtgttcattgccctgggcctggttttagagctagaaatagcaagttaaaataaggctagtccgttatcaacttgaaaaagtggcaccgagtcggtgcgtgttccagccaccggcccagggcattttttt

SEQ ID NO: 1927 - RNA, 129 nt, synthetic construct
  source 1..129: mol_type = other RNA
gtgttcattgccctgggcctggttttagagctagaaatagcaagttaaaataaggctagtccgttatcaacttgaaaaagtggcaccgagtcggtgcaagtgttccagccaccggcccagggttttttt

SEQ ID NO: 1928 - RNA, 129 nt, synthetic construct
  source 1..129: mol_type = other RNA
gtgttcattgccctgggcctggttttagagctagaaatagcaagttaaaataaggctagtccgttatcaacttgaaaaagtggcaccgagtcggtgctgttccagccaccggcccagggcaattttttt

SEQ ID NO: 1929 - RNA, 130 nt, synthetic construct
  source 1..130: mol_type = other RNA
tgttcattgccctgggcctggttttagagctagaaatagcaagttaaaataaggctagtccgttatcaacttgaaaaagtggcaccgagtcggtgcgccaagtgttccagccaccggcccagggcaatga

SEQ ID NO: 1930 - RNA, 130 nt, synthetic construct
  source 1..130: mol_type = other RNA
gtgttcattgccctgggcctggttttagagctagaaatagcaagttaaaataaggctagtccgttatcaacttgaaaaagtggcaccgagtcggtgctgttccagccaccggcccagggcaatttttttt

SEQ ID NO: 1931 - RNA, 130 nt, synthetic construct
  source 1..130: mol_type = other RNA
gtgttcattgccctgggcctggttttagagctagaaatagcaagttaaaataaggctagtccgttatcaacttgaaaaagtggcaccgagtcggtgcgtgttccagccaccggcccagggcaattttttt

SEQ ID NO: 1932 - RNA, 130 nt, synthetic construct
  source 1..130: mol_type = other RNA
gtgttcattgccctgggcctggttttagagctagaaatagcaagttaaaataaggctagtccgttatcaacttgaaaaagtggcaccgagtcggtgcgttccagccaccggcccagggcaatgttttttt

SEQ ID NO: 1933 - RNA, 130 nt, synthetic construct
  source 1..130: mol_type = other RNA
gtgttcattgccctgggcctggttttagagctagaaatagcaagttaaaataaggctagtccgttatcaacttgaaaaagtggcaccgagtcggtgcttccagccaccggcccagggcaatgattttttt

SEQ ID NO: 1934 - RNA, 130 nt, synthetic construct
  source 1..130: mol_type = other RNA
gtgttcattgccctgggcctggttttagagctagaaatagcaagttaaaataaggctagtccgttatcaacttgaaaaagtggcaccgagtcggtgcagtgttccagccaccggcccagggcattttttt

SEQ ID NO: 1935 - RNA, 130 nt, synthetic construct
  source 1..130: mol_type = other RNA
gtgttcattgccctgggcctggttttagagctagaaatagcaagttaaaataaggctagtccgttatcaacttgaaaaagtggcaccgagtcggtgcaagtgttccagccaccggcccagggcttttttt

SEQ ID NO: 1936 - RNA, 131 nt, synthetic construct
  source 1..131: mol_type = other RNA
gtgttcattgccctgggcctggttttagagctagaaatagcaagttaaaataaggctagtccgttatcaacttgaaaaagtggcaccgagtcggtgcagtgttccagccaccggcccagggcaattttttt

SEQ ID NO: 1937 - RNA, 131 nt, synthetic construct
  source 1..131: mol_type = other RNA
gtgttcattgccctgggcctggttttagagctagaaatagcaagttaaaataaggctagtccgttatcaacttgaaaaagtggcaccgagtcggtgcgttccagccaccggcccagggcaatgattttttt

SEQ ID NO: 1938 - RNA, 131 nt, synthetic construct
  source 1..131: mol_type = other RNA
gtgttcattgccctgggcctggttttagagctagaaatagcaagttaaaataaggctagtccgttatcaacttgaaaaagtggcaccgagtcggtgcaagtgttccagccaccggcccagggcattttttt

SEQ ID NO: 1939 - RNA, 131 nt, synthetic construct
  source 1..131: mol_type = other RNA
gtgttcattgccctgggcctggttttagagctagaaatagcaagttaaaataaggctagtccgttatcaacttgaaaaagtggcaccgagtcggtgctgttccagccaccggcccagggcaatgttttttt

SEQ ID NO: 1940 - RNA, 131 nt, synthetic construct
  source 1..131: mol_type = other RNA
gtgttcattgccctgggcctggttttagagctagaaatagcaagttaaaataaggctagtccgttatcaacttgaaaaagtggcaccgagtcggtgcgtgttccagccaccggcccagggcaatttttttt

SEQ ID NO: 1941 - RNA, 132 nt, synthetic construct
  source 1..132: mol_type = other RNA
gtgttcattgccctgggcctggttttagagctagaaatagcaagttaaaataaggctagtccgttatcaacttgaaaaagtggcaccgagtcggtgcagtgttccagccaccggcccagggcaatttttttt

SEQ ID NO: 1942 - RNA, 132 nt, synthetic construct
  source 1..132: mol_type = other RNA
gtgttcattgccctgggcctggttttagagctagaaatagcaagttaaaataaggctagtccgttatcaacttgaaaaagtggcaccgagtcggtgcgccaagtgttccagccaccggcccagggttttttt

SEQ ID NO: 1943 - RNA, 132 nt, synthetic construct
  source 1..132: mol_type = other RNA
gtgttcattgccctgggcctggttttagagctagaaatagcaagttaaaataaggctagtccgttatcaacttgaaaaagtggcaccgagtcggtgcaagtgttccagccaccggcccagggcaattttttt

SEQ ID NO: 1944 - RNA, 132 nt, synthetic construct
  source 1..132: mol_type = other RNA
gtgttcattgccctgggcctggttttagagctagaaatagcaagttaaaataaggctagtccgttatcaacttgaaaaagtggcaccgagtcggtgctgttccagccaccggcccagggcaatgattttttt

SEQ ID NO: 1945 - RNA, 132 nt, synthetic construct
  source 1..132: mol_type = other RNA
gtgttcattgccctgggcctggttttagagctagaaatagcaagttaaaataaggctagtccgttatcaacttgaaaaagtggcaccgagtcggtgcgtgttccagccaccggcccagggcaatgttttttt

SEQ ID NO: 1946 - RNA, 133 nt, synthetic construct
  source 1..133: mol_type = other RNA
gtgttcattgccctgggcctggttttagagctagaaatagcaagttaaaataaggctagtccgttatcaacttgaaaaagtggcaccgagtcggtgcaagtgttccagccaccggcccagggcaatttttttt

SEQ ID NO: 1947 - RNA, 133 nt, synthetic construct
  source 1..133: mol_type = other RNA
gtgttcattgccctgggcctggttttagagctagaaatagcaagttaaaataaggctagtccgttatcaacttgaaaaagtggcaccgagtcggtgcgtgttccagccaccggcccagggcaatgattttttt

SEQ ID NO: 1948 - RNA, 133 nt, synthetic construct
  source 1..133: mol_type = other RNA
gtgttcattgccctgggcctggttttagagctagaaatagcaagttaaaataaggctagtccgttatcaacttgaaaaagtggcaccgagtcggtgcgccaagtgttccagccaccggcccagggcttttttt

SEQ ID NO: 1949 - RNA, 133 nt, synthetic construct
  source 1..133: mol_type = other RNA
gtgttcattgccctgggcctggttttagagctagaaatagcaagttaaaataaggctagtccgttatcaacttgaaaaagtggcaccgagtcggtgcagtgttccagccaccggcccagggcaatgttttttt

SEQ ID NO: 1950 - RNA, 134 nt, synthetic construct
  source 1..134: mol_type = other RNA
gtgttcattgccctgggcctggttttagagctagaaatagcaagttaaaataaggctagtccgttatcaacttgaaaaagtggcaccgagtcggtgcagtgttccagccaccggcccagggcaatgattttttt

SEQ ID NO: 1951 - RNA, 134 nt, synthetic construct
  source 1..134: mol_type = other RNA
gtgttcattgccctgggcctggttttagagctagaaatagcaagttaaaataaggctagtccgttatcaacttgaaaaagtggcaccgagtcggtgcaagtgttccagccaccggcccagggcaatgttttttt

SEQ ID NO: 1952 - RNA, 134 nt, synthetic construct
  source 1..134: mol_type = other RNA
gtgttcattgccctgggcctggttttagagctagaaatagcaagttaaaataaggctagtccgttatcaacttgaaaaagtggcaccgagtcggtgcgccaagtgttccagccaccggcccagggcattttttt

SEQ ID NO: 1953 - RNA, 135 nt, synthetic construct
  source 1..135: mol_type = other RNA
gtgttcattgccctgggcctggttttagagctagaaatagcaagttaaaataaggctagtccgttatcaacttgaaaaagtggcaccgagtcggtgcgccaagtgttccagccaccggcccagggcaattttttt

SEQ ID NO: 1954 - RNA, 135 nt, synthetic construct
  source 1..135: mol_type = other RNA
gtgttcattgccctgggcctggttttagagctagaaatagcaagttaaaataaggctagtccgttatcaacttgaaaaagtggcaccgagtcggtgcaagtgttccagccaccggcccagggcaatgattttttt

SEQ ID NO: 1955 - RNA, 136 nt, synthetic construct
  source 1..136: mol_type = other RNA
gtgttcattgccctgggcctggttttagagctagaaatagcaagttaaaataaggctagtccgttatcaacttgaaaaagtggcaccgagtcggtgcgccaagtgttccagccaccggcccagggcaatttttttt

SEQ ID NO: 1956 - RNA, 137 nt, synthetic construct
  source 1..137: mol_type = other RNA
gtgttcattgccctgggcctggttttagagctagaaatagcaagttaaaataaggctagtccgttatcaacttgaaaaagtggcaccgagtcggtgcgccaagtgttccagccaccggcccagggcaatgttttttt

SEQ ID NO: 1957 - RNA, 138 nt, synthetic construct
  source 1..138: mol_type = other RNA
gtgttcattgccctgggcctggttttagagctagaaatagcaagttaaaataaggctagtccgttatcaacttgaaaaagtggcaccgagtcggtgcgccaagtgttccagccaccggcccagggcaatgattttttt

SEQ ID NO: 1958 - RNA, 96 nt, synthetic construct
  source 1..96: mol_type = other RNA
ataattagtaattctaaacagttttagagctagaaatagcaagttaaaataaggctagtccgttatcaacttgaaaaagtggcaccgagtcggtgc

SEQ ID NO: 1959 - RNA, 97 nt, synthetic construct
  source 1..97: mol_type = other RNA
gataattagtaattctaaacagttttagagctagaaatagcaagttaaaataaggctagtccgttatcaacttgaaaaagtggcaccgagtcggtgc

SEQ ID NO: 1960 - RNA, 16 nt, synthetic construct
  source 1..16: mol_type = other RNA
ttagtaattctaaaca

SEQ ID NO: 1961 - RNA, 17 nt, synthetic construct
  source 1..17: mol_type = other RNA
attagtaattctaaaca

SEQ ID NO: 1962 - RNA, 18 nt, synthetic construct
  source 1..18: mol_type = other RNA
aattagtaattctaaaca

SEQ ID NO: 1963 - RNA, 19 nt, synthetic construct
  source 1..19: mol_type = other RNA
taattagtaattctaaaca

SEQ ID NO: 1964 - RNA, 20 nt, synthetic construct
  source 1..20: mol_type = other RNA
ataattagtaattctaaaca

SEQ ID NO: 1965 - RNA, 21 nt, synthetic construct
  source 1..21: mol_type = other RNA
tataattagtaattctaaaca

SEQ ID NO: 1966 - RNA, 22 nt, synthetic construct
  source 1..22: mol_type = other RNA
gtataattagtaattctaaaca

SEQ ID NO: 1967-1973 - skipped (7 entries)

SEQ ID NO: 1974 - RNA, 10 nt, synthetic construct
  source 1..10: mol_type = other RNA
ttagaattac

SEQ ID NO: 1975 - RNA, 11 nt, synthetic construct
  source 1..11: mol_type = other RNA
ttagaattact

SEQ ID NO: 1976 - RNA, 12 nt, synthetic construct
  source 1..12: mol_type = other RNA
ttagaattacta

SEQ ID NO: 1977 - RNA, 13 nt, synthetic construct
  source 1..13: mol_type = other RNA
ttagaattactaa

SEQ ID NO: 1978 - RNA, 14 nt, synthetic construct
  source 1..14: mol_type = other RNA
ttagaattactaat

SEQ ID NO: 1979 - RNA, 15 nt, synthetic construct
  source 1..15: mol_type = other RNA
ttagaattactaatt

SEQ ID NO: 1980 - RNA, 16 nt, synthetic construct
  source 1..16: mol_type = other RNA
ttagaattactaatta

SEQ ID NO: 1981 - RNA, 17 nt, synthetic construct
  source 1..17: mol_type = other RNA
ttagaattactaattat

SEQ ID NO: 1982 - RNA, 18 nt, synthetic construct
  source 1..18: mol_type = other RNA
ttagaattactaattata

SEQ ID NO: 1983 - RNA, 19 nt, synthetic construct
  source 1..19: mol_type = other RNA
ttagaattactaattatac

SEQ ID NO: 1984 - RNA, 96 nt, synthetic construct
  source 1..96: mol_type = other RNA
ggtggctggaacacttggcaaaggtaacagcagcttcaggttcagaaaagagctgctccttcagtaaacaaatctcacttcctctgaacaccatgt

SEQ ID NO: 1985 - RNA, 97 nt, synthetic construct
  source 1..97: mol_type = other RNA
cggtggctggaacacttggcaaaggtaacagcagcttcaggttcagaaaagagctgctccttcagtaaacaaatctcacttcctctgaacaccatgt

SEQ ID NO: 1986 - RNA, 98 nt, synthetic construct
  source 1..98: mol_type = other RNA
ccggtggctggaacacttggcaaaggtaacagcagcttcaggttcagaaaagagctgctccttcagtaaacaaatctcacttcctctgaacaccatgt

SEQ ID NO: 1987 - RNA, 99 nt, synthetic construct
  source 1..99: mol_type = other RNA
gccggtggctggaacacttggcaaaggtaacagcagcttcaggttcagaaaagagctgctccttcagtaaacaaatctcacttcctctgaacaccatgt

SEQ ID NO: 1988 - RNA, 100 nt, synthetic construct
  source 1..100: mol_type = other RNA
ggccggtggctggaacacttggcaaaggtaacagcagcttcaggttcagaaaagagctgctccttcagtaaacaaatctcacttcctctgaacaccatgt

SEQ ID NO: 1989 - RNA, 20 nt, synthetic construct
  source 1..20: mol_type = other RNA
cacttggcaaaggtaacagc

SEQ ID NO: 1990 - RNA, 20 nt, synthetic construct
  source 1..20: mol_type = other RNA
gtggctggaacacttggcaa

SEQ ID NO: 1991 - RNA, 20 nt, synthetic construct
  source 1..20: mol_type = other RNA
taaacaaatctcacttcctc

SEQ ID NO: 1992 - RNA, 20 nt, synthetic construct
  source 1..20: mol_type = other RNA
caaaggtaacagcagcttca

SEQ ID NO: 1993 - RNA, 20 nt, synthetic construct
  source 1..20: mol_type = other RNA
cagaaaagagctgctccttc

SEQ ID NO: 1994 - RNA, 20 nt, synthetic construct
  source 1..20: mol_type = other RNA
tgttcattgccctgggccgg

SEQ ID NO: 1995 - RNA, 20 nt, synthetic construct
  source 1..20: mol_type = other RNA
gtaacagcagcttcaggttc

SEQ ID NO: 1996 - RNA, 20 nt, synthetic construct
  source 1..20: mol_type = other RNA
agcagcttcaggttcagaaa

SEQ ID NO: 1997 - RNA, 20 nt, synthetic construct
  source 1..20: mol_type = other RNA
gcaaaggtaacagcagcttc

SEQ ID NO: 1998 - RNA, 20 nt, synthetic construct
  source 1..20: mol_type = other RNA
ggccggtggctggaacactt

SEQ ID NO: 1999 - RNA, 20 nt, synthetic construct
  source 1..20: mol_type = other RNA
cagcttcaggttcagaaaag

SEQ ID NO: 2000 - RNA, 20 nt, synthetic construct
  source 1..20: mol_type = other RNA
cattgccctgggccggtggc

SEQ ID NO: 2001 - RNA, 20 nt, synthetic construct
  source 1..20: mol_type = other RNA
tggctggaacacttggcaaa

SEQ ID NO: 2002 - RNA, 20 nt, synthetic construct
  source 1..20: mol_type = other RNA
cttcaggttcagaaaagagc

SEQ ID NO: 2003 - RNA, 20 nt, synthetic construct
  source 1..20: mol_type = other RNA
gggccggtggctggaacact

SEQ ID NO: 2004 - RNA, 20 nt, synthetic construct
  source 1..20: mol_type = other RNA
gttcattgccctgggccggt

SEQ ID NO: 2005 - RNA, 20 nt, synthetic construct
  source 1..20: mol_type = other RNA
attgccctgggccggtggct

SEQ ID NO: 2006 - RNA, 20 nt, synthetic construct
  source 1..20: mol_type = other RNA
tgtgttcattgccctgggcc

SEQ ID NO: 2007 - RNA, 20 nt, synthetic construct
  source 1..20: mol_type = other RNA
ctcacttcctctgaacacca

SEQ ID NO: 2008 - RNA, 20 nt, synthetic construct
  source 1..20: mol_type = other RNA
gaacacttggcaaaggtaac

SEQ ID NO: 2009 - RNA, 20 nt, synthetic construct
  source 1..20: mol_type = other RNA
ttcctctgaacaccatgttt

SEQ ID NO: 2010 - RNA, 96 nt, synthetic construct
  source 1..96: mol_type = other RNA
gcaaaggtaacagcagcttcgttttagagctagaaatagcaagttaaaataaggctagtccgttatcaacttgaaaaagtggcaccgagtcggtgc

SEQ ID NO: 2011 - RNA, 96 nt, synthetic construct
  source 1..96: mol_type = other RNA
gggccggtggctggaacactgttttagagctagaaatagcaagttaaaataaggctagtccgttatcaacttgaaaaagtggcaccgagtcggtgc

SEQ ID NO: 2012 - RNA, 96 nt, synthetic construct
  source 1..96: mol_type = other RNA
tgttcattgccctgggccgggttttagagctagaaatagcaagttaaaataaggctagtccgttatcaacttgaaaaagtggcaccgagtcggtgc

SEQ ID NO: 2013 - RNA, 96 nt, synthetic construct
  source 1..96: mol_type = other RNA
cattgccctgggccggtggcgttttagagctagaaatagcaagttaaaataaggctagtccgttatcaacttgaaaaagtggcaccgagtcggtgc

SEQ ID NO: 2014 - RNA, 96 nt, synthetic construct
  source 1..96: mol_type = other RNA
gtggctggaacacttggcaagttttagagctagaaatagcaagttaaaataaggctagtccgttatcaacttgaaaaagtggcaccgagtcggtgc

SEQ ID NO: 2015 - RNA, 97 nt, synthetic construct
  source 1..97: mol_type = other RNA
gtgttcattgccctgggccgggttttagagctagaaatagcaagttaaaataaggctagtccgttatcaacttgaaaaagtggcaccgagtcggtgc

SEQ ID NO: 2016 - RNA, 97 nt, synthetic construct
  source 1..97: mol_type = other RNA
gcattgccctgggccggtggcgttttagagctagaaatagcaagttaaaataaggctagtccgttatcaacttgaaaaagtggcaccgagtcggtgc

SEQ ID NO: 2017 - RNA, 16 nt, synthetic construct
  source 1..16: mol_type = other RNA
taaacatggtgttcag

SEQ ID NO: 2018 - RNA, 17 nt, synthetic construct
  source 1..17: mol_type = other RNA
ctaaacatggtgttcag

SEQ ID NO: 2019 - RNA, 18 nt, synthetic construct
  source 1..18: mol_type = other RNA
tctaaacatggtgttcag

SEQ ID NO: 2020 - RNA, 19 nt, synthetic construct
  source 1..19: mol_type = other RNA
ttctaaacatggtgttcag

SEQ ID NO: 2021 - RNA, 20 nt, synthetic construct
  source 1..20: mol_type = other RNA
attctaaacatggtgttcag

SEQ ID NO: 2022 - RNA, 21 nt, synthetic construct
  source 1..21: mol_type = other RNA
aattctaaacatggtgttcag

SEQ ID NO: 2023 - RNA, 22 nt, synthetic construct
  source 1..22: mol_type = other RNA
taattctaaacatggtgttcag

SEQ ID NO: 2024-2030 - skipped (7 entries)

SEQ ID NO: 2031 - RNA, 10 nt, synthetic construct
  source 1..10: mol_type = other RNA
aacaccatgt

SEQ ID NO: 2032 - RNA, 11 nt, synthetic construct
  source 1..11: mol_type = other RNA
aacaccatgtt

SEQ ID NO: 2033 - RNA, 12 nt, synthetic construct
  source 1..12: mol_type = other RNA
aacaccatgttt

SEQ ID NO: 2034 - RNA, 13 nt, synthetic construct
  source 1..13: mol_type = other RNA
aacaccatgttta

SEQ ID NO: 2035 - RNA, 14 nt, synthetic construct
  source 1..14: mol_type = other RNA
aacaccatgtttag

SEQ ID NO: 2036 - RNA, 15 nt, synthetic construct
  source 1..15: mol_type = other RNA
aacaccatgtttaga

SEQ ID NO: 2037 - RNA, 16 nt, synthetic construct
  source 1..16: mol_type = other RNA
aacaccatgtttagaa

SEQ ID NO: 2038 - RNA, 17 nt, synthetic construct
  source 1..17: mol_type = other RNA
aacaccatgtttagaat

SEQ ID NO: 2039 - RNA, 18 nt, synthetic construct
  source 1..18: mol_type = other RNA
aacaccatgtttagaatt

SEQ ID NO: 2040 - RNA, 19 nt, synthetic construct
  source 1..19: mol_type = other RNA
aacaccatgtttagaatta

SEQ ID NO: 2041 - RNA, 86 nt, synthetic construct
  source 1..86: mol_type = other RNA
ggtggctggaacacttggcaaaggtaacagcagcttcaggttcagaaaagagctgctccttcagtaaacaaatctcacttcctctg

SEQ ID NO: 2042 - RNA, 87 nt, synthetic construct
  source 1..87: mol_type = other RNA
cggtggctggaacacttggcaaaggtaacagcagcttcaggttcagaaaagagctgctccttcagtaaacaaatctcacttcctctg

SEQ ID NO: 2043 - RNA, 88 nt, synthetic construct
  source 1..88: mol_type = other RNA
ccggtggctggaacacttggcaaaggtaacagcagcttcaggttcagaaaagagctgctccttcagtaaacaaatctcacttcctctg

SEQ ID NO: 2044 - RNA, 89 nt, synthetic construct
  source 1..89: mol_type = other RNA
gccggtggctggaacacttggcaaaggtaacagcagcttcaggttcagaaaagagctgctccttcagtaaacaaatctcacttcctctg

SEQ ID NO: 2045 - RNA, 90 nt, synthetic construct
  source 1..90: mol_type = other RNA
ggccggtggctggaacacttggcaaaggtaacagcagcttcaggttcagaaaagagctgctccttcagtaaacaaatctcacttcctctg

SEQ ID NO: 2046 - RNA, 91 nt, synthetic construct
  source 1..91: mol_type = other RNA
gggccggtggctggaacacttggcaaaggtaacagcagcttcaggttcagaaaagagctgctccttcagtaaacaaatctcacttcctctg

SEQ ID NO: 2047 - RNA, 92 nt, synthetic construct
  source 1..92: mol_type = other RNA
tgggccggtggctggaacacttggcaaaggtaacagcagcttcaggttcagaaaagagctgctccttcagtaaacaaatctcacttcctctg

SEQ ID NO: 2048 - RNA, 93 nt, synthetic construct
  source 1..93: mol_type = other RNA
ctgggccggtggctggaacacttggcaaaggtaacagcagcttcaggttcagaaaagagctgctccttcagtaaacaaatctcacttcctctg

SEQ ID NO: 2049 - RNA, 94 nt, synthetic construct
  source 1..94: mol_type = other RNA
cctgggccggtggctggaacacttggcaaaggtaacagcagcttcaggttcagaaaagagctgctccttcagtaaacaaatctcacttcctctg

SEQ ID NO: 2050 - RNA, 95 nt, synthetic construct
  source 1..95: mol_type = other RNA
ccctgggccggtggctggaacacttggcaaaggtaacagcagcttcaggttcagaaaagagctgctccttcagtaaacaaatctcacttcctctg

SEQ ID NO: 2051 - RNA, 96 nt, synthetic construct
  source 1..96: mol_type = other RNA
gccctgggccggtggctggaacacttggcaaaggtaacagcagcttcaggttcagaaaagagctgctccttcagtaaacaaatctcacttcctctg

SEQ ID NO: 2052 - RNA, 97 nt, synthetic construct
  source 1..97: mol_type = other RNA
tgccctgggccggtggctggaacacttggcaaaggtaacagcagcttcaggttcagaaaagagctgctccttcagtaaacaaatctcacttcctctg

SEQ ID NO: 2053 - RNA, 98 nt, synthetic construct
  source 1..98: mol_type = other RNA
ttgccctgggccggtggctggaacacttggcaaaggtaacagcagcttcaggttcagaaaagagctgctccttcagtaaacaaatctcacttcctctg

SEQ ID NO: 2054 - RNA, 99 nt, synthetic construct
  source 1..99: mol_type = other RNA
attgccctgggccggtggctggaacacttggcaaaggtaacagcagcttcaggttcagaaaagagctgctccttcagtaaacaaatctcacttcctctg

SEQ ID NO: 2055 - RNA, 100 nt, synthetic construct
  source 1..100: mol_type = other RNA
cattgccctgggccggtggctggaacacttggcaaaggtaacagcagcttcaggttcagaaaagagctgctccttcagtaaacaaatctcacttcctctg

SEQ ID NO: 2056 - RNA, 20 nt, synthetic construct
  source 1..20: mol_type = other RNA
gctctttgtgttcattgccc

SEQ ID NO: 2057 - RNA, 20 nt, synthetic construct
  source 1..20: mol_type = other RNA
ctctttgtgttcattgccct

SEQ ID NO: 2058 - RNA, 20 nt, synthetic construct
  source 1..20: mol_type = other RNA
cccatgctctttgtgttcat

SEQ ID NO: 2059 - RNA, 20 nt, synthetic construct
  source 1..20: mol_type = other RNA
tctttgtgttcattgccctg

SEQ ID NO: 2060 - RNA, 96 nt, synthetic construct
  source 1..96: mol_type = other RNA
ctctttgtgttcattgccctgttttagagctagaaatagcaagttaaaataaggctagtccgttatcaacttgaaaaagtggcaccgagtcggtgc

SEQ ID NO: 2061 - RNA, 96 nt, synthetic construct
  source 1..96: mol_type = other RNA
gctctttgtgttcattgcccgttttagagctagaaatagcaagttaaaataaggctagtccgttatcaacttgaaaaagtggcaccgagtcggtgc

SEQ ID NO: 2062 - RNA, 97 nt, synthetic construct
  source 1..97: mol_type = other RNA
gctctttgtgttcattgccctgttttagagctagaaatagcaagttaaaataaggctagtccgttatcaacttgaaaaagtggcaccgagtcggtgc

SEQ ID NO: 2063 - RNA, 16 nt, synthetic construct
  source 1..16: mol_type = other RNA
gagatttgtttactga

SEQ ID NO: 2064 - RNA, 17 nt, synthetic construct
  source 1..17: mol_type = other RNA
tgagatttgtttactga

SEQ ID NO: 2065 - RNA, 18 nt, synthetic construct
  source 1..18: mol_type = other RNA
gtgagatttgtttactga

SEQ ID NO: 2066 - RNA, 19 nt, synthetic construct
  source 1..19: mol_type = other RNA
agtgagatttgtttactga

SEQ ID NO: 2067 - RNA, 20 nt, synthetic construct
  source 1..20: mol_type = other RNA
aagtgagatttgtttactga

SEQ ID NO: 2068 - RNA, 21 nt, synthetic construct
  source 1..21: mol_type = other RNA
gaagtgagatttgtttactga

SEQ ID NO: 2069 - RNA, 22 nt, synthetic construct
  source 1..22: mol_type = other RNA
ggaagtgagatttgtttactga

SEQ ID NO: 2070-2076 - skipped (7 entries)

SEQ ID NO: 2077 - RNA, 10 nt, synthetic construct
  source 1..10: mol_type = other RNA
gtaaacaaat

SEQ ID NO: 2078 - RNA, 11 nt, synthetic construct
  source 1..11: mol_type = other RNA
gtaaacaaatc

SEQ ID NO: 2079 - RNA, 12 nt, synthetic construct
  source 1..12: mol_type = other RNA
gtaaacaaatct

SEQ ID NO: 2080 - RNA, 13 nt, synthetic construct
  source 1..13: mol_type = other RNA
gtaaacaaatctc

SEQ ID NO: 2081 - RNA, 14 nt, synthetic construct
  source 1..14: mol_type = other RNA
gtaaacaaatctca

SEQ ID NO: 2082 - RNA, 15 nt, synthetic construct
  source 1..15: mol_type = other RNA
gtaaacaaatctcac

SEQ ID NO: 2083 - RNA, 16 nt, synthetic construct
  source 1..16: mol_type = other RNA
gtaaacaaatctcact

SEQ ID NO: 2084 - RNA, 17 nt, synthetic construct
  source 1..17: mol_type = other RNA
gtaaacaaatctcactt

SEQ ID NO: 2085 - RNA, 18 nt, synthetic construct
  source 1..18: mol_type = other RNA
gtaaacaaatctcacttc

SEQ ID NO: 2086 - RNA, 19 nt, synthetic construct
  source 1..19: mol_type = other RNA
gtaaacaaatctcacttcc

SEQ ID NO: 2087 - RNA, 63 nt, synthetic construct
  source 1..63: mol_type = other RNA
ggtggctggaacacttggcaaaggtaacagcagcttcaggttcagaaaagagctgctccttca

SEQ ID NO: 2088 - RNA, 64 nt, synthetic construct
  source 1..64: mol_type = other RNA
cggtggctggaacacttggcaaaggtaacagcagcttcaggttcagaaaagagctgctccttca

SEQ ID NO: 2089 - RNA, 65 nt, synthetic construct
  source 1..65: mol_type = other RNA
ccggtggctggaacacttggcaaaggtaacagcagcttcaggttcagaaaagagctgctccttca

SEQ ID NO: 2090 - RNA, 66 nt, synthetic construct
  source 1..66: mol_type = other RNA
gccggtggctggaacacttggcaaaggtaacagcagcttcaggttcagaaaagagctgctccttca

SEQ ID NO: 2091 - RNA, 67 nt, synthetic construct
  source 1..67: mol_type = other RNA
ggccggtggctggaacacttggcaaaggtaacagcagcttcaggttcagaaaagagctgctccttca

SEQ ID NO: 2092 - RNA, 68 nt, synthetic construct
  source 1..68: mol_type = other RNA
gggccggtggctggaacacttggcaaaggtaacagcagcttcaggttcagaaaagagctgctccttca

SEQ ID NO: 2093 - RNA, 69 nt, synthetic construct
  source 1..69: mol_type = other RNA
tgggccggtggctggaacacttggcaaaggtaacagcagcttcaggttcagaaaagagctgctccttca

SEQ ID NO: 2094 - RNA, 70 nt, synthetic construct
  source 1..70: mol_type = other RNA
ctgggccggtggctggaacacttggcaaaggtaacagcagcttcaggttcagaaaagagctgctccttca

SEQ ID NO: 2095 - RNA, 71 nt, synthetic construct
  source 1..71: mol_type = other RNA
cctgggccggtggctggaacacttggcaaaggtaacagcagcttcaggttcagaaaagagctgctccttca

SEQ ID NO: 2096 - RNA, 72 nt, synthetic construct
  source 1..72: mol_type = other RNA
ccctgggccggtggctggaacacttggcaaaggtaacagcagcttcaggttcagaaaagagctgctccttca

SEQ ID NO: 2097 - RNA, 73 nt, synthetic construct
  source 1..73: mol_type = other RNA
gccctgggccggtggctggaacacttggcaaaggtaacagcagcttcaggttcagaaaagagctgctccttca

SEQ ID NO: 2098 - RNA, 74 nt, synthetic construct
  source 1..74: mol_type = other RNA
tgccctgggccggtggctggaacacttggcaaaggtaacagcagcttcaggttcagaaaagagctgctccttca

SEQ ID NO: 2099 - RNA, 75 nt, synthetic construct
  source 1..75: mol_type = other RNA
ttgccctgggccggtggctggaacacttggcaaaggtaacagcagcttcaggttcagaaaagagctgctccttca

SEQ ID NO: 2100 - RNA, 76 nt, synthetic construct
  source 1..76: mol_type = other RNA
attgccctgggccggtggctggaacacttggcaaaggtaacagcagcttcaggttcagaaaagagctgctccttca

SEQ ID NO: 2101 - RNA, 77 nt, synthetic construct
  source 1..77: mol_type = other RNA
cattgccctgggccggtggctggaacacttggcaaaggtaacagcagcttcaggttcagaaaagagctgctccttca

SEQ ID NO: 2102 - RNA, 78 nt, synthetic construct
  source 1..78: mol_type = other RNA
tcattgccctgggccggtggctggaacacttggcaaaggtaacagcagcttcaggttcagaaaagagctgctccttca

SEQ ID NO: 2103 - RNA, 79 nt, synthetic construct
  source 1..79: mol_type = other RNA
ttcattgccctgggccggtggctggaacacttggcaaaggtaacagcagcttcaggttcagaaaagagctgctccttca

SEQ ID NO: 2104 - RNA, 80 nt, synthetic construct
  source 1..80: mol_type = other RNA
gttcattgccctgggccggtggctggaacacttggcaaaggtaacagcagcttcaggttcagaaaagagctgctccttca

SEQ ID NO: 2105 - RNA, 81 nt, synthetic construct
  source 1..81: mol_type = other RNA
tgttcattgccctgggccggtggctggaacacttggcaaaggtaacagcagcttcaggttcagaaaagagctgctccttca

SEQ ID NO: 2106 - RNA, 82 nt, synthetic construct
  source 1..82: mol_type = other RNA
gtgttcattgccctgggccggtggctggaacacttggcaaaggtaacagcagcttcaggttcagaaaagagctgctccttca

SEQ ID NO: 2107 - RNA, 83 nt, synthetic construct
  source 1..83: mol_type = other RNA
tgtgttcattgccctgggccggtggctggaacacttggcaaaggtaacagcagcttcaggttcagaaaagagctgctccttca

SEQ ID NO: 2108 - RNA, 84 nt, synthetic construct
  source 1..84: mol_type = other RNA
ttgtgttcattgccctgggccggtggctggaacacttggcaaaggtaacagcagcttcaggttcagaaaagagctgctccttca

SEQ ID NO: 2109 - RNA, 85 nt, synthetic construct
  source 1..85: mol_type = other RNA
tttgtgttcattgccctgggccggtggctggaacacttggcaaaggtaacagcagcttcaggttcagaaaagagctgctccttca

SEQ ID NO: 2110 - RNA, 86 nt, synthetic construct
  source 1..86: mol_type = other RNA
ctttgtgttcattgccctgggccggtggctggaacacttggcaaaggtaacagcagcttcaggttcagaaaagagctgctccttca

SEQ ID NO: 2111 - RNA, 87 nt, synthetic construct
  source 1..87: mol_type = other RNA
tctttgtgttcattgccctgggccggtggctggaacacttggcaaaggtaacagcagcttcaggttcagaaaagagctgctccttca

SEQ ID NO: 2112 - RNA, 88 nt, synthetic construct
  source 1..88: mol_type = other RNA
ctctttgtgttcattgccctgggccggtggctggaacacttggcaaaggtaacagcagcttcaggttcagaaaagagctgctccttca

SEQ ID NO: 2113 - RNA, 89 nt, synthetic construct
  source 1..89: mol_type = other RNA
gctctttgtgttcattgccctgggccggtggctggaacacttggcaaaggtaacagcagcttcaggttcagaaaagagctgctccttca

SEQ ID NO: 2114 - RNA, 90 nt, synthetic construct
  source 1..90: mol_type = other RNA
tgctctttgtgttcattgccctgggccggtggctggaacacttggcaaaggtaacagcagcttcaggttcagaaaagagctgctccttca

SEQ ID NO: 2115 - RNA, 91 nt, synthetic construct
  source 1..91: mol_type = other RNA
atgctctttgtgttcattgccctgggccggtggctggaacacttggcaaaggtaacagcagcttcaggttcagaaaagagctgctccttca

SEQ ID NO: 2116 - RNA, 92 nt, synthetic construct
  source 1..92: mol_type = other RNA
catgctctttgtgttcattgccctgggccggtggctggaacacttggcaaaggtaacagcagcttcaggttcagaaaagagctgctccttca

SEQ ID NO: 2117 - RNA, 93 nt, synthetic construct
  source 1..93: mol_type = other RNA
ccatgctctttgtgttcattgccctgggccggtggctggaacacttggcaaaggtaacagcagcttcaggttcagaaaagagctgctccttca

SEQ ID NO: 2118 - RNA, 94 nt, synthetic construct
  source 1..94: mol_type = other RNA
cccatgctctttgtgttcattgccctgggccggtggctggaacacttggcaaaggtaacagcagcttcaggttcagaaaagagctgctccttca

SEQ ID NO: 2119 - RNA, 95 nt, synthetic construct
  source 1..95: mol_type = other RNA
ccccatgctctttgtgttcattgccctgggccggtggctggaacacttggcaaaggtaacagcagcttcaggttcagaaaagagctgctccttca

SEQ ID NO: 2120 - RNA, 96 nt, synthetic construct
  source 1..96: mol_type = other RNA
cccccatgctctttgtgttcattgccctgggccggtggctggaacacttggcaaaggtaacagcagcttcaggttcagaaaagagctgctccttca

SEQ ID NO: 2121 - RNA, 97 nt, synthetic construct
  source 1..97: mol_type = other RNA
ccccccatgctctttgtgttcattgccctgggccggtggctggaacacttggcaaaggtaacagcagcttcaggttcagaaaagagctgctccttca

SEQ ID NO: 2122 - RNA, 98 nt, synthetic construct
  source 1..98: mol_type = other RNA
gccccccatgctctttgtgttcattgccctgggccggtggctggaacacttggcaaaggtaacagcagcttcaggttcagaaaagagctgctccttca

SEQ ID NO: 2123 - RNA, 99 nt, synthetic construct
  source 1..99: mol_type = other RNA
cgccccccatgctctttgtgttcattgccctgggccggtggctggaacacttggcaaaggtaacagcagcttcaggttcagaaaagagctgctccttca

SEQ ID NO: 2124 - RNA, 100 nt, synthetic construct
  source 1..100: mol_type = other RNA
acgccccccatgctctttgtgttcattgccctgggccggtggctggaacacttggcaaaggtaacagcagcttcaggttcagaaaagagctgctccttca

SEQ ID NO: 2125 - RNA, 20 nt, synthetic construct
  source 1..20: mol_type = other RNA
cacgccccccatgctctttg

SEQ ID NO: 2126 - RNA, 20 nt, synthetic construct
  source 1..20: mol_type = other RNA
gacacgccccccatgctctt

SEQ ID NO: 2127 - RNA, 20 nt, synthetic construct
  source 1..20: mol_type = other RNA
attcttcgacacgcccccca

SEQ ID NO: 2128 - RNA, 16 nt, synthetic construct
  source 1..16: mol_type = other RNA
caagtgttccagccac

SEQ ID NO: 2129 - RNA, 17 nt, synthetic construct
  source 1..17: mol_type = other RNA
ccaagtgttccagccac

SEQ ID NO: 2130 - RNA, 18 nt, synthetic construct
  source 1..18: mol_type = other RNA
gccaagtgttccagccac

SEQ ID NO: 2131 - RNA, 19 nt, synthetic construct
  source 1..19: mol_type = other RNA
tgccaagtgttccagccac

SEQ ID NO: 2132 - RNA, 20 nt, synthetic construct
  source 1..20: mol_type = other RNA
ttgccaagtgttccagccac

SEQ ID NO: 2133 - RNA, 21 nt, synthetic construct
  source 1..21: mol_type = other RNA
tttgccaagtgttccagccac

SEQ ID NO: 2134 - RNA, 22 nt, synthetic construct
  source 1..22: mol_type = other RNA
ctttgccaagtgttccagccac

SEQ ID NO: 2135-2141 - skipped (7 entries)

SEQ ID NO: 2142 - RNA, 10 nt, synthetic construct
  source 1..10: mol_type = other RNA
gctggaacac

SEQ ID NO: 2143 - RNA, 11 nt, synthetic construct
  source 1..11: mol_type = other RNA
gctggaacact

SEQ ID NO: 2144 - RNA, 12 nt, synthetic construct
  source 1..12: mol_type = other RNA
gctggaacactt

SEQ ID NO: 2145 - RNA, 13 nt, synthetic construct
  source 1..13: mol_type = other RNA
gctggaacacttg

SEQ ID NO: 2146 - RNA, 14 nt, synthetic construct
  source 1..14: mol_type = other RNA
gctggaacacttgg

SEQ ID NO: 2147 - RNA, 15 nt, synthetic construct
  source 1..15: mol_type = other RNA
gctggaacacttggc

SEQ ID NO: 2148 - RNA, 16 nt, synthetic construct
  source 1..16: mol_type = other RNA
gctggaacacttggca

SEQ ID NO: 2149 - RNA, 17 nt, synthetic construct
  source 1..17: mol_type = other RNA
gctggaacacttggcaa

SEQ ID NO: 2150 - RNA, 18 nt, synthetic construct
  source 1..18: mol_type = other RNA
gctggaacacttggcaaa

SEQ ID NO: 2151 - RNA, 19 nt, synthetic construct
  source 1..19: mol_type = other RNA
gctggaacacttggcaaag

SEQ ID NO: 2152 - RNA, 10 nt, synthetic construct
  source 1..10: mol_type = other RNA
tgggcaggtg

SEQ ID NO: 2153 - RNA, 10 nt, synthetic construct
  source 1..10: mol_type = other RNA
tggggaggtg

SEQ ID NO: 2154 - RNA, 10 nt, synthetic construct
  source 1..10: mol_type = other RNA
tgggacggtg

SEQ ID NO: 2155 - RNA, 10 nt, synthetic construct
  source 1..10: mol_type = other RNA
tgggtcggtg

SEQ ID NO: 2156 - RNA, 10 nt, synthetic construct
  source 1..10: mol_type = other RNA
tgggtagatg

SEQ ID NO: 2157 - RNA, 10 nt, synthetic construct
  source 1..10: mol_type = other RNA
tgggaaggtg

SEQ ID NO: 2158 - RNA, 10 nt, synthetic construct
  source 1..10: mol_type = other RNA
tgggcagatg

SEQ ID NO: 2159 - RNA, 10 nt, synthetic construct
  source 1..10: mol_type = other RNA
tggggcggtg

SEQ ID NO: 2160 - RNA, 10 nt, synthetic construct
  source 1..10: mol_type = other RNA
tgggtaggtg

SEQ ID NO: 2161 - RNA, 10 nt, synthetic construct
  source 1..10: mol_type = other RNA
tggggagatg

SEQ ID NO: 2162 - RNA, 10 nt, synthetic construct
  source 1..10: mol_type = other RNA
tgggccggtg

SEQ ID NO: 2163 - RNA, 10 nt, synthetic construct
  source 1..10: mol_type = other RNA
tgggaagatg

SEQ ID NO: 2164 - RNA, 11 nt, synthetic construct
  source 1..11: mol_type = other RNA
ctgggtagatg

SEQ ID NO: 2165 - RNA, 11 nt, synthetic construct
  source 1..11: mol_type = other RNA
ctggggcggtg

SEQ ID NO: 2166 - RNA, 11 nt, synthetic construct
  source 1..11: mol_type = other RNA
ctgggacggtg

SEQ ID NO: 2167 - RNA, 11 nt, synthetic construct
  source 1..11: mol_type = other RNA
ctgggtcggtg

SEQ ID NO: 2168 - RNA, 11 nt, synthetic construct
  source 1..11: mol_type = other RNA
ctgggcaggtg

SEQ ID NO: 2169 - RNA, 11 nt, synthetic construct
  source 1..11: mol_type = other RNA
ctgggaagatg

SEQ ID NO: 2170 - RNA, 11 nt, synthetic construct
  source 1..11: mol_type = other RNA
ctgggcagatg

SEQ ID NO: 2171 - RNA, 11 nt, synthetic construct
  source 1..11: mol_type = other RNA
ctgggtaggtg

SEQ ID NO: 2172 - RNA, 11 nt, synthetic construct
  source 1..11: mol_type = other RNA
ctggggagatg

SEQ ID NO: 2173 - RNA, 11 nt, synthetic construct
  source 1..11: mol_type = other RNA
ctggggaggtg

SEQ ID NO: 2174 - RNA, 11 nt, synthetic construct
  source 1..11: mol_type = other RNA
ctgggaaggtg

SEQ ID NO: 2175 - RNA, 11 nt, synthetic construct
  source 1..11: mol_type = other RNA
ctgggccggtg

SEQ ID NO: 2176 - RNA, 12 nt, synthetic construct
  source 1..12: mol_type = other RNA
cctgggcaggtg

SEQ ID NO: 2177 - RNA, 12 nt, synthetic construct
  source 1..12: mol_type = other RNA
cctgggacggtg

SEQ ID NO: 2178 - RNA, 12 nt, synthetic construct
  source 1..12: mol_type = other RNA
cctgggcagatg

SEQ ID NO: 2179 - RNA, 12 nt, synthetic construct
  source 1..12: mol_type = other RNA
cctggggaggtg

SEQ ID NO: 2180 - RNA, 12 nt, synthetic construct
  source 1..12: mol_type = other RNA
cctgggccggtg

SEQ ID NO: 2181 - RNA, 12 nt, synthetic construct
  source 1..12: mol_type = other RNA
cctggggagatg

SEQ ID NO: 2182 - RNA, 12 nt, synthetic construct
  source 1..12: mol_type = other RNA
cctgggtcggtg

SEQ ID NO: 2183 - RNA, 12 nt, synthetic construct
  source 1..12: mol_type = other RNA
cctggggcggtg

SEQ ID NO: 2184 - RNA, 12 nt, synthetic construct
  source 1..12: mol_type = other RNA
cctgggaagatg

SEQ ID NO: 2185 - RNA, 12 nt, synthetic construct
  source 1..12: mol_type = other RNA
cctgggaaggtg

SEQ ID NO: 2186 - RNA, 12 nt, synthetic construct
  source 1..12: mol_type = other RNA
cctgggtaggtg

SEQ ID NO: 2187 - RNA, 12 nt, synthetic construct
  source 1..12: mol_type = other RNA
cctgggtagatg

SEQ ID NO: 2188 - RNA, 13 nt, synthetic construct
  source 1..13: mol_type = other RNA
ccctgggaaggtg

SEQ ID NO: 2189 - RNA, 13 nt, synthetic construct
  source 1..13: mol_type = other RNA
ccctgggacggtg

SEQ ID NO: 2190 - RNA, 13 nt, synthetic construct
  source 1..13: mol_type = other RNA
ccctgggcaggtg

SEQ ID NO: 2191 - RNA, 13 nt, synthetic construct
  source 1..13: mol_type = other RNA
ccctgggccggtg

SEQ ID NO: 2192 - RNA, 13 nt, synthetic construct
  source 1..13: mol_type = other RNA
ccctgggaagatg

SEQ ID NO: 2193 - RNA, 13 nt, synthetic construct
  source 1..13: mol_type = other RNA
ccctgggtagatg

SEQ ID NO: 2194 - RNA, 13 nt, synthetic construct
  source 1..13: mol_type = other RNA
ccctggggcggtg

SEQ ID NO: 2195 - RNA, 13 nt, synthetic construct
  source 1..13: mol_type = other RNA
ccctgggtcggtg

SEQ ID NO: 2196 - RNA, 13 nt, synthetic construct
  source 1..13: mol_type = other RNA
ccctgggtaggtg

SEQ ID NO: 2197 - RNA, 13 nt, synthetic construct
  source 1..13: mol_type = other RNA
ccctggggagatg

SEQ ID NO: 2198 - RNA, 13 nt, synthetic construct
  source 1..13: mol_type = other RNA
ccctggggaggtg

SEQ ID NO: 2199 - RNA, 13 nt, synthetic construct
  source 1..13: mol_type = other RNA
ccctgggcagatg

SEQ ID NO: 2200 - RNA, 14 nt, synthetic construct
  source 1..14: mol_type = other RNA
gccctgggcaggtg

SEQ ID NO: 2201 - RNA, 14 nt, synthetic construct
  source 1..14: mol_type = other RNA
gccctggggcggtg

SEQ ID NO: 2202 - RNA, 14 nt, synthetic construct
  source 1..14: mol_type = other RNA
gccctggggaggtg

SEQ ID NO: 2203 - RNA, 14 nt, synthetic construct
  source 1..14: mol_type = other RNA
gccctggggagatg

SEQ ID NO: 2204 - RNA, 14 nt, synthetic construct
  source 1..14: mol_type = other RNA
gccctgggacggtg

SEQ ID NO: 2205 - RNA, 14 nt, synthetic construct
  source 1..14: mol_type = other RNA
gccctgggaaggtg

SEQ ID NO: 2206 - RNA, 14 nt, synthetic construct
  source 1..14: mol_type = other RNA
gccctgggtaggtg

SEQ ID NO: 2207 - RNA, 14 nt, synthetic construct
  source 1..14: mol_type = other RNA
gccctgggcagatg

SEQ ID NO: 2208 - RNA, 14 nt, synthetic construct
  source 1..14: mol_type = other RNA
gccctgggaagatg

SEQ ID NO: 2209 - RNA, 14 nt, synthetic construct
  source 1..14: mol_type = other RNA
gccctgggccggtg

SEQ ID NO: 2210 - RNA, 14 nt, synthetic construct
  source 1..14: mol_type = other RNA
gccctgggtagatg

SEQ ID NO: 2211 - RNA, 14 nt, synthetic construct
  source 1..14: mol_type = other RNA
gccctgggtcggtg

SEQ ID NO: 2212 - RNA, 15 nt, synthetic construct
  source 1..15: mol_type = other RNA
tgccctgggaaggtg

SEQ ID NO: 2213 - RNA, 15 nt, synthetic construct
  source 1..15: mol_type = other RNA
tgccctggggagatg

SEQ ID NO: 2214 - RNA, 15 nt, synthetic construct
  source 1..15: mol_type = other RNA
tgccctgggtaggtg

SEQ ID NO: 2215 - RNA, 15 nt, synthetic construct
  source 1..15: mol_type = other RNA
tgccctggggcggtg

SEQ ID NO: 2216 - RNA, 15 nt, synthetic construct
  source 1..15: mol_type = other RNA
tgccctgggtcggtg

SEQ ID NO: 2217 - RNA, 15 nt, synthetic construct
  source 1..15: mol_type = other RNA
tgccctgggtagatg

SEQ ID NO: 2218 - RNA, 15 nt, synthetic construct
  source 1..15: mol_type = other RNA
tgccctgggacggtg

SEQ ID NO: 2219 - RNA, 15 nt, synthetic construct
  source 1..15: mol_type = other RNA
tgccctgggcagatg

SEQ ID NO: 2220 - RNA, 15 nt, synthetic construct
  source 1..15: mol_type = other RNA
tgccctgggaagatg

SEQ ID NO: 2221 - RNA, 15 nt, synthetic construct
  source 1..15: mol_type = other RNA
tgccctgggcaggtg

SEQ ID NO: 2222 - RNA, 15 nt, synthetic construct
  source 1..15: mol_type = other RNA
tgccctggggaggtg

SEQ ID NO: 2223 - RNA, 15 nt, synthetic construct
  source 1..15: mol_type = other RNA
tgccctgggccggtg

SEQ ID NO: 2224 - RNA, 16 nt, synthetic construct
  source 1..16: mol_type = other RNA
ttgccctgggtaggtg

SEQ ID NO: 2225 - RNA, 16 nt, synthetic construct
  source 1..16: mol_type = other RNA
ttgccctgggcaggtg

SEQ ID NO: 2226 - RNA, 16 nt, synthetic construct
  source 1..16: mol_type = other RNA
ttgccctgggccggtg

SEQ ID NO: 2227 - RNA, 16 nt, synthetic construct
  source 1..16: mol_type = other RNA
ttgccctgggtcggtg

SEQ ID NO: 2228 - RNA, 16 nt, synthetic construct
  source 1..16: mol_type = other RNA
ttgccctgggtagatg

SEQ ID NO: 2229 - RNA, 16 nt, synthetic construct
  source 1..16: mol_type = other RNA
ttgccctggggaggtg

SEQ ID NO: 2230 - RNA, 16 nt, synthetic construct
  source 1..16: mol_type = other RNA
ttgccctgggcagatg

SEQ ID NO: 2231 - RNA, 16 nt, synthetic construct
  source 1..16: mol_type = other RNA
ttgccctggggagatg

SEQ ID NO: 2232 - RNA, 16 nt, synthetic construct
  source 1..16: mol_type = other RNA
ttgccctgggacggtg

SEQ ID NO: 2233 - RNA, 16 nt, synthetic construct
  source 1..16: mol_type = other RNA
ttgccctgggaaggtg

SEQ ID NO: 2234 - RNA, 16 nt, synthetic construct
  source 1..16: mol_type = other RNA
ttgccctgggaagatg

SEQ ID NO: 2235 - RNA, 16 nt, synthetic construct
  source 1..16: mol_type = other RNA
ttgccctggggcggtg

SEQ ID NO: 2236 - RNA, 17 nt, synthetic construct
  source 1..17: mol_type = other RNA
attgccctggggaggtg

SEQ ID NO: 2237 - RNA, 17 nt, synthetic construct
  source 1..17: mol_type = other RNA
attgccctgggaaggtg

SEQ ID NO: 2238 - RNA, 17 nt, synthetic construct
  source 1..17: mol_type = other RNA
attgccctgggccggtg

SEQ ID NO: 2239 - RNA, 17 nt, synthetic construct
  source 1..17: mol_type = other RNA
attgccctgggcagatg

SEQ ID NO: 2240 - RNA, 17 nt, synthetic construct
  source 1..17: mol_type = other RNA
attgccctggggcggtg

SEQ ID NO: 2241 - RNA, 17 nt, synthetic construct
  source 1..17: mol_type = other RNA
attgccctgggtagatg

SEQ ID NO: 2242 - RNA, 17 nt, synthetic construct
  source 1..17: mol_type = other RNA
attgccctgggacggtg

SEQ ID NO: 2243 - RNA, 17 nt, synthetic construct
  source 1..17: mol_type = other RNA
attgccctgggtaggtg

SEQ ID NO: 2244 - RNA, 17 nt, synthetic construct
  source 1..17: mol_type = other RNA
attgccctgggcaggtg

SEQ ID NO: 2245 - RNA, 17 nt, synthetic construct
  source 1..17: mol_type = other RNA
attgccctgggtcggtg

SEQ ID NO: 2246 - RNA, 17 nt, synthetic construct
  source 1..17: mol_type = other RNA
attgccctggggagatg

SEQ ID NO: 2247 - RNA, 17 nt, synthetic construct
  source 1..17: mol_type = other RNA
attgccctgggaagatg

SEQ ID NO: 2248 - RNA, 18 nt, synthetic construct
  source 1..18: mol_type = other RNA
cattgccctgggcagatg

SEQ ID NO: 2249 - RNA, 18 nt, synthetic construct
  source 1..18: mol_type = other RNA
cattgccctggggcggtg

SEQ ID NO: 2250 - RNA, 18 nt, synthetic construct
  source 1..18: mol_type = other RNA
cattgccctgggacggtg

SEQ ID NO: 2251 - RNA, 18 nt, synthetic construct
  source 1..18: mol_type = other RNA
cattgccctgggtagatg

SEQ ID NO: 2252 - RNA, 18 nt, synthetic construct
  source 1..18: mol_type = other RNA
cattgccctgggtaggtg

SEQ ID NO: 2253 - RNA, 18 nt, synthetic construct
  source 1..18: mol_type = other RNA
cattgccctggggagatg

SEQ ID NO: 2254 - RNA, 18 nt, synthetic construct
  source 1..18: mol_type = other RNA
cattgccctgggtcggtg

SEQ ID NO: 2255 - RNA, 18 nt, synthetic construct
  source 1..18: mol_type = other RNA
cattgccctgggcaggtg

SEQ ID NO: 2256 - RNA, 18 nt, synthetic construct
  source 1..18: mol_type = other RNA
cattgccctgggccggtg

SEQ ID NO: 2257 - RNA, 18 nt, synthetic construct
  source 1..18: mol_type = other RNA
cattgccctgggaagatg

SEQ ID NO: 2258 - RNA, 18 nt, synthetic construct
  source 1..18: mol_type = other RNA
cattgccctgggaaggtg

SEQ ID NO: 2259 - RNA, 18 nt, synthetic construct
  source 1..18: mol_type = other RNA
cattgccctggggaggtg

SEQ ID NO: 2260 - RNA, 19 nt, synthetic construct
  source 1..19: mol_type = other RNA
tcattgccctgggtcggtg

SEQ ID NO: 2261 - RNA, 19 nt, synthetic construct
  source 1..19: mol_type = other RNA
tcattgccctgggcagatg

SEQ ID NO: 2262 - RNA, 19 nt, synthetic construct
  source 1..19: mol_type = other RNA
tcattgccctgggcaggtg

SEQ ID NO: 2263 - RNA, 19 nt, synthetic construct
  source 1..19: mol_type = other RNA
tcattgccctgggccggtg

SEQ ID NO: 2264 - RNA, 19 nt, synthetic construct
  source 1..19: mol_type = other RNA
tcattgccctggggaggtg

SEQ ID NO: 2265 - RNA, 19 nt, synthetic construct
  source 1..19: mol_type = other RNA
tcattgccctgggaaggtg

SEQ ID NO: 2266 - RNA, 19 nt, synthetic construct
  source 1..19: mol_type = other RNA
tcattgccctgggtagatg

SEQ ID NO: 2267 - RNA, 19 nt, synthetic construct
  source 1..19: mol_type = other RNA
tcattgccctggggagatg

SEQ ID NO: 2268 - RNA, 19 nt, synthetic construct
  source 1..19: mol_type = other RNA
tcattgccctgggtaggtg

SEQ ID NO: 2269 - RNA, 19 nt, synthetic construct
  source 1..19: mol_type = other RNA
tcattgccctggggcggtg

SEQ ID NO: 2270 - RNA, 19 nt, synthetic construct
  source 1..19: mol_type = other RNA
tcattgccctgggaagatg

SEQ ID NO: 2271 - RNA, 19 nt, synthetic construct
  source 1..19: mol_type = other RNA
tcattgccctgggacggtg

SEQ ID NO: 2272 - RNA, 20 nt, synthetic construct
  source 1..20: mol_type = other RNA
ttcattgccctgggcaggtg

SEQ ID NO: 2273 - RNA, 20 nt, synthetic construct
  source 1..20: mol_type = other RNA
ttcattgccctggggagatg

SEQ ID NO: 2274 - RNA, 20 nt, synthetic construct
  source 1..20: mol_type = other RNA
ttcattgccctgggaaggtg

SEQ ID NO: 2275 - RNA, 20 nt, synthetic construct
  source 1..20: mol_type = other RNA
ttcattgccctgggcagatg

SEQ ID NO: 2276 - RNA, 20 nt, synthetic construct
  source 1..20: mol_type = other RNA
ttcattgccctggggaggtg

SEQ ID NO: 2277 - RNA, 20 nt, synthetic construct
  source 1..20: mol_type = other RNA
ttcattgccctggggcggtg

SEQ ID NO: 2278 - RNA, 20 nt, synthetic construct
  source 1..20: mol_type = other RNA
ttcattgccctgggaagatg

SEQ ID NO: 2279 - RNA, 20 nt, synthetic construct
  source 1..20: mol_type = other RNA
ttcattgccctgggccggtg

SEQ ID NO: 2280 - RNA, 20 nt, synthetic construct
  source 1..20: mol_type = other RNA
ttcattgccctgggacggtg

SEQ ID NO: 2281 - RNA, 20 nt, synthetic construct
  source 1..20: mol_type = other RNA
ttcattgccctgggtaggtg

SEQ ID NO: 2282 - RNA, 20 nt, synthetic construct
  source 1..20: mol_type = other RNA
ttcattgccctgggtcggtg

SEQ ID NO: 2283 - RNA, 20 nt, synthetic construct
  source 1..20: mol_type = other RNA
ttcattgccctgggtagatg

SEQ ID NO: 2284 - RNA, 21 nt, synthetic construct
  source 1..21: mol_type = other RNA
gttcattgccctggggaggtg

SEQ ID NO: 2285 - RNA, 21 nt, synthetic construct
  source 1..21: mol_type = other RNA
gttcattgccctggggcggtg

SEQ ID NO: 2286 - RNA, 21 nt, synthetic construct
  source 1..21: mol_type = other RNA
gttcattgccctgggaagatg

SEQ ID NO: 2287 - RNA, 21 nt, synthetic construct
  source 1..21: mol_type = other RNA
gttcattgccctgggtagatg

SEQ ID NO: 2288 - RNA, 21 nt, synthetic construct
  source 1..21: mol_type = other RNA
gttcattgccctgggacggtg

SEQ ID NO: 2289 - RNA, 21 nt, synthetic construct
  source 1..21: mol_type = other RNA
gttcattgccctggggagatg

SEQ ID NO: 2290 - RNA, 21 nt, synthetic construct
  source 1..21: mol_type = other RNA
gttcattgccctgggtcggtg

SEQ ID NO: 2291 - RNA, 21 nt, synthetic construct
  source 1..21: mol_type = other RNA
gttcattgccctgggaaggtg

SEQ ID NO: 2292 - RNA, 21 nt, synthetic construct
  source 1..21: mol_type = other RNA
gttcattgccctgggcaggtg

SEQ ID NO: 2293 - RNA, 21 nt, synthetic construct
  source 1..21: mol_type = other RNA
gttcattgccctgggtaggtg

SEQ ID NO: 2294 - RNA, 21 nt, synthetic construct
  source 1..21: mol_type = other RNA
gttcattgccctgggcagatg

SEQ ID NO: 2295 - RNA, 21 nt, synthetic construct
  source 1..21: mol_type = other RNA
gttcattgccctgggccggtg

SEQ ID NO: 2296 - RNA, 22 nt, synthetic construct
  source 1..22: mol_type = other RNA
tgttcattgccctgggtagatg

SEQ ID NO: 2297 - RNA, 22 nt, synthetic construct
  source 1..22: mol_type = other RNA
tgttcattgccctgggaagatg

SEQ ID NO: 2298 - RNA, 22 nt, synthetic construct
  source 1..22: mol_type = other RNA
tgttcattgccctgggtcggtg

SEQ ID NO: 2299 - RNA, 22 nt, synthetic construct
  source 1..22: mol_type = other RNA
tgttcattgccctgggtaggtg

SEQ ID NO: 2300 - RNA, 22 nt, synthetic construct
  source 1..22: mol_type = other RNA
tgttcattgccctgggaaggtg

SEQ ID NO: 2301 - RNA, 22 nt, synthetic construct
  source 1..22: mol_type = other RNA
tgttcattgccctgggcagatg

SEQ ID NO: 2302 - RNA, 22 nt, synthetic construct
  source 1..22: mol_type = other RNA
tgttcattgccctggggcggtg

SEQ ID NO: 2303 - RNA, 22 nt, synthetic construct
  source 1..22: mol_type = other RNA
tgttcattgccctgggacggtg

SEQ ID NO: 2304 - RNA, 22 nt, synthetic construct
  source 1..22: mol_type = other RNA
tgttcattgccctggggagatg

SEQ ID NO: 2305 - RNA, 22 nt, synthetic construct
  source 1..22: mol_type = other RNA
tgttcattgccctgggcaggtg

SEQ ID NO: 2306 - RNA, 22 nt, synthetic construct
  source 1..22: mol_type = other RNA
tgttcattgccctggggaggtg

SEQ ID NO: 2307 - RNA, 22 nt, synthetic construct
  source 1..22: mol_type = other RNA
tgttcattgccctgggccggtg

SEQ ID NO: 2308 - RNA, 23 nt, synthetic construct
  source 1..23: mol_type = other RNA
gtgttcattgccctgggtagatg

SEQ ID NO: 2309 - RNA, 23 nt, synthetic construct
  source 1..23: mol_type = other RNA
gtgttcattgccctgggcaggtg

SEQ ID NO: 2310 - RNA, 23 nt, synthetic construct
  source 1..23: mol_type = other RNA
gtgttcattgccctgggaaggtg

SEQ ID NO: 2311 - RNA, 23 nt, synthetic construct
  source 1..23: mol_type = other RNA
gtgttcattgccctgggacggtg

SEQ ID NO: 2312 - RNA, 23 nt, synthetic construct
  source 1..23: mol_type = other RNA
gtgttcattgccctgggcagatg

SEQ ID NO: 2313 - RNA, 23 nt, synthetic construct
  source 1..23: mol_type = other RNA
gtgttcattgccctgggccggtg

SEQ ID NO: 2314 - RNA, 23 nt, synthetic construct
  source 1..23: mol_type = other RNA
gtgttcattgccctgggtaggtg

SEQ ID NO: 2315 - RNA, 23 nt, synthetic construct
  source 1..23: mol_type = other RNA
gtgttcattgccctgggaagatg

SEQ ID NO: 2316 - RNA, 23 nt, synthetic construct
  source 1..23: mol_type = other RNA
gtgttcattgccctggggaggtg

SEQ ID NO: 2317 - RNA, 23 nt, synthetic construct
  source 1..23: mol_type = other RNA
gtgttcattgccctggggagatg

SEQ ID NO: 2318 - RNA, 23 nt, synthetic construct
  source 1..23: mol_type = other RNA
gtgttcattgccctggggcggtg

SEQ ID NO: 2319 - RNA, 23 nt, synthetic construct
  source 1..23: mol_type = other RNA
gtgttcattgccctgggtcggtg

SEQ ID NO: 2320 - RNA, 24 nt, synthetic construct
  source 1..24: mol_type = other RNA
tgtgttcattgccctgggaagatg

SEQ ID NO: 2321 - RNA, 24 nt, synthetic construct
  source 1..24: mol_type = other RNA
tgtgttcattgccctgggcaggtg

SEQ ID NO: 2322 - RNA, 24 nt, synthetic construct
  source 1..24: mol_type = other RNA
tgtgttcattgccctggggaggtg

SEQ ID NO: 2323 - RNA, 24 nt, synthetic construct
  source 1..24: mol_type = other RNA
tgtgttcattgccctgggcagatg

SEQ ID NO: 2324 - RNA, 24 nt, synthetic construct
  source 1..24: mol_type = other RNA
tgtgttcattgccctgggccggtg

SEQ ID NO: 2325 - RNA, 24 nt, synthetic construct
  source 1..24: mol_type = other RNA
tgtgttcattgccctgggacggtg

SEQ ID NO: 2326 - RNA, 24 nt, synthetic construct
  source 1..24: mol_type = other RNA
tgtgttcattgccctggggcggtg

SEQ ID NO: 2327 - RNA, 24 nt, synthetic construct
  source 1..24: mol_type = other RNA
tgtgttcattgccctgggtagatg

SEQ ID NO: 2328 - RNA, 24 nt, synthetic construct
  source 1..24: mol_type = other RNA
tgtgttcattgccctggggagatg

SEQ ID NO: 2329 - RNA, 24 nt, synthetic construct
  source 1..24: mol_type = other RNA
tgtgttcattgccctgggtaggtg

SEQ ID NO: 2330 - RNA, 24 nt, synthetic construct
  source 1..24: mol_type = other RNA
tgtgttcattgccctgggtcggtg

SEQ ID NO: 2331 - RNA, 24 nt, synthetic construct
  source 1..24: mol_type = other RNA
tgtgttcattgccctgggaaggtg

SEQ ID NO: 2332 - RNA, 25 nt, synthetic construct
  source 1..25: mol_type = other RNA
ttgtgttcattgccctgggaaggtg

SEQ ID NO: 2333 - RNA, 25 nt, synthetic construct
  source 1..25: mol_type = other RNA
ttgtgttcattgccctggggcggtg

SEQ ID NO: 2334 - RNA, 25 nt, synthetic construct
  source 1..25: mol_type = other RNA
ttgtgttcattgccctgggcagatg

SEQ ID NO: 2335 - RNA, 25 nt, synthetic construct
  source 1..25: mol_type = other RNA
ttgtgttcattgccctgggtaggtg

SEQ ID NO: 2336 - RNA, 25 nt, synthetic construct
  source 1..25: mol_type = other RNA
ttgtgttcattgccctgggacggtg

SEQ ID NO: 2337 - RNA, 25 nt, synthetic construct
  source 1..25: mol_type = other RNA
ttgtgttcattgccctgggtcggtg

SEQ ID NO: 2338 - RNA, 25 nt, synthetic construct
  source 1..25: mol_type = other RNA
ttgtgttcattgccctgggccggtg

SEQ ID NO: 2339 - RNA, 25 nt, synthetic construct
  source 1..25: mol_type = other RNA
ttgtgttcattgccctggggaggtg

SEQ ID NO: 2340 - RNA, 25 nt, synthetic construct
  source 1..25: mol_type = other RNA
ttgtgttcattgccctgggcaggtg

SEQ ID NO: 2341 - RNA, 25 nt, synthetic construct
  source 1..25: mol_type = other RNA
ttgtgttcattgccctggggagatg

SEQ ID NO: 2342 - RNA, 25 nt, synthetic construct
  source 1..25: mol_type = other RNA
ttgtgttcattgccctgggtagatg

SEQ ID NO: 2343 - RNA, 25 nt, synthetic construct
  source 1..25: mol_type = other RNA
ttgtgttcattgccctgggaagatg

SEQ ID NO: 2344 - RNA, 26 nt, synthetic construct
  source 1..26: mol_type = other RNA
tttgtgttcattgccctggggcggtg

SEQ ID NO: 2345 - RNA, 26 nt, synthetic construct
  source 1..26: mol_type = other RNA
tttgtgttcattgccctggggagatg

SEQ ID NO: 2346 - RNA, 26 nt, synthetic construct
  source 1..26: mol_type = other RNA
tttgtgttcattgccctgggcaggtg

SEQ ID NO: 2347 - RNA, 26 nt, synthetic construct
  source 1..26: mol_type = other RNA
tttgtgttcattgccctgggaaggtg

SEQ ID NO: 2348 - RNA, 26 nt, synthetic construct
  source 1..26: mol_type = other RNA
tttgtgttcattgccctgggccggtg

SEQ ID NO: 2349 - RNA, 26 nt, synthetic construct
  source 1..26: mol_type = other RNA
tttgtgttcattgccctgggacggtg

SEQ ID NO: 2350 - RNA, 26 nt, synthetic construct
  source 1..26: mol_type = other RNA
tttgtgttcattgccctgggaagatg

SEQ ID NO: 2351 - RNA, 26 nt, synthetic construct
  source 1..26: mol_type = other RNA
tttgtgttcattgccctgggtagatg

SEQ ID NO: 2352 - RNA, 26 nt, synthetic construct
  source 1..26: mol_type = other RNA
tttgtgttcattgccctgggcagatg

SEQ ID NO: 2353 - RNA, 26 nt, synthetic construct
  source 1..26: mol_type = other RNA
tttgtgttcattgccctggggaggtg

SEQ ID NO: 2354 - RNA, 26 nt, synthetic construct
  source 1..26: mol_type = other RNA
tttgtgttcattgccctgggtcggtg

SEQ ID NO: 2355 - RNA, 26 nt, synthetic construct
  source 1..26: mol_type = other RNA
tttgtgttcattgccctgggtaggtg

SEQ ID NO: 2356 - RNA, 27 nt, synthetic construct
  source 1..27: mol_type = other RNA
ctttgtgttcattgccctgggtagatg

SEQ ID NO: 2357 - RNA, 27 nt, synthetic construct
  source 1..27: mol_type = other RNA
ctttgtgttcattgccctgggaaggtg

SEQ ID NO: 2358 - RNA, 27 nt, synthetic construct
  source 1..27: mol_type = other RNA
ctttgtgttcattgccctgggcaggtg

SEQ ID NO: 2359 - RNA, 27 nt, synthetic construct
  source 1..27: mol_type = other RNA
ctttgtgttcattgccctgggacggtg

SEQ ID NO: 2360 - RNA, 27 nt, synthetic construct
  source 1..27: mol_type = other RNA
ctttgtgttcattgccctgggccggtg

SEQ ID NO: 2361 - RNA, 27 nt, synthetic construct
  source 1..27: mol_type = other RNA
ctttgtgttcattgccctgggaagatg

SEQ ID NO: 2362 - RNA, 27 nt, synthetic construct
  source 1..27: mol_type = other RNA
ctttgtgttcattgccctgggtaggtg

SEQ ID NO: 2363 - RNA, 27 nt, synthetic construct
  source 1..27: mol_type = other RNA
ctttgtgttcattgccctggggaggtg

SEQ ID NO: 2364 - RNA, 27 nt, synthetic construct
  source 1..27: mol_type = other RNA
ctttgtgttcattgccctggggcggtg

SEQ ID NO: 2365 - RNA, 27 nt, synthetic construct
  source 1..27: mol_type = other RNA
ctttgtgttcattgccctgggcagatg

SEQ ID NO: 2366 - RNA, 27 nt, synthetic construct
  source 1..27: mol_type = other RNA
ctttgtgttcattgccctgggtcggtg

SEQ ID NO: 2367 - RNA, 27 nt, synthetic construct
  source 1..27: mol_type = other RNA
ctttgtgttcattgccctggggagatg

SEQ ID NO: 2368 - RNA, 28 nt, synthetic construct
  source 1..28: mol_type = other RNA
tctttgtgttcattgccctgggaagatg

SEQ ID NO: 2369 - RNA, 28 nt, synthetic construct
  source 1..28: mol_type = other RNA
tctttgtgttcattgccctgggcaggtg

SEQ ID NO: 2370 - RNA, 28 nt, synthetic construct
  source 1..28: mol_type = other RNA
tctttgtgttcattgccctgggtcggtg

SEQ ID NO: 2371 - RNA, 28 nt, synthetic construct
  source 1..28: mol_type = other RNA
tctttgtgttcattgccctggggcggtg

SEQ ID NO: 2372 - RNA, 28 nt, synthetic construct
  source 1..28: mol_type = other RNA
tctttgtgttcattgccctgggccggtg

SEQ ID NO: 2373 - RNA, 28 nt, synthetic construct
  source 1..28: mol_type = other RNA
tctttgtgttcattgccctgggcagatg

SEQ ID NO: 2374 - RNA, 28 nt, synthetic construct
  source 1..28: mol_type = other RNA
tctttgtgttcattgccctgggacggtg

SEQ ID NO: 2375 - RNA, 28 nt, synthetic construct
  source 1..28: mol_type = other RNA
tctttgtgttcattgccctgggaaggtg

SEQ ID NO: 2376 - RNA, 28 nt, synthetic construct
  source 1..28: mol_type = other RNA
tctttgtgttcattgccctggggaggtg

SEQ ID NO: 2377 - RNA, 28 nt, synthetic construct
  source 1..28: mol_type = other RNA
tctttgtgttcattgccctgggtaggtg

SEQ ID NO: 2378 - RNA, 28 nt, synthetic construct
  source 1..28: mol_type = other RNA
tctttgtgttcattgccctggggagatg

SEQ ID NO: 2379 - RNA, 28 nt, synthetic construct
  source 1..28: mol_type = other RNA
tctttgtgttcattgccctgggtagatg

SEQ ID NO: 2380 - RNA, 29 nt, synthetic construct
  source 1..29: mol_type = other RNA
ctctttgtgttcattgccctgggccggtg

SEQ ID NO: 2381 - RNA, 29 nt, synthetic construct
  source 1..29: mol_type = other RNA
ctctttgtgttcattgccctgggaaggtg

SEQ ID NO: 2382 - RNA, 29 nt, synthetic construct
  source 1..29: mol_type = other RNA
ctctttgtgttcattgccctgggtagatg

SEQ ID NO: 2383 - RNA, 29 nt, synthetic construct
  source 1..29: mol_type = other RNA
ctctttgtgttcattgccctggggcggtg

SEQ ID NO: 2384 - RNA, 29 nt, synthetic construct
  source 1..29: mol_type = other RNA
ctctttgtgttcattgccctggggaggtg

SEQ ID NO: 2385 - RNA, 29 nt, synthetic construct
  source 1..29: mol_type = other RNA
ctctttgtgttcattgccctgggcagatg

SEQ ID NO: 2386 - RNA, 29 nt, synthetic construct
  source 1..29: mol_type = other RNA
ctctttgtgttcattgccctggggagatg

SEQ ID NO: 2387 - RNA, 29 nt, synthetic construct
  source 1..29: mol_type = other RNA
ctctttgtgttcattgccctgggtcggtg

SEQ ID NO: 2388 - RNA, 29 nt, synthetic construct
  source 1..29: mol_type = other RNA
ctctttgtgttcattgccctgggcaggtg

SEQ ID NO: 2389 - RNA, 29 nt, synthetic construct
  source 1..29: mol_type = other RNA
ctctttgtgttcattgccctgggaagatg

SEQ ID NO: 2390 - RNA, 29 nt, synthetic construct
  source 1..29: mol_type = other RNA
ctctttgtgttcattgccctgggtaggtg

SEQ ID NO: 2391 - RNA, 29 nt, synthetic construct
  source 1..29: mol_type = other RNA
ctctttgtgttcattgccctgggacggtg

SEQ ID NO: 2392 - RNA, 30 nt, synthetic construct
  source 1..30: mol_type = other RNA
gctctttgtgttcattgccctgggcaggtg

SEQ ID NO: 2393 - RNA, 30 nt, synthetic construct
  source 1..30: mol_type = other RNA
gctctttgtgttcattgccctgggtagatg

SEQ ID NO: 2394 - RNA, 30 nt, synthetic construct
  source 1..30: mol_type = other RNA
gctctttgtgttcattgccctgggccggtg

SEQ ID NO: 2395 - RNA, 30 nt, synthetic construct
  source 1..30: mol_type = other RNA
gctctttgtgttcattgccctggggaggtg

SEQ ID NO: 2396 - RNA, 30 nt, synthetic construct
  source 1..30: mol_type = other RNA
gctctttgtgttcattgccctggggagatg

SEQ ID NO: 2397 - RNA, 30 nt, synthetic construct
  source 1..30: mol_type = other RNA
gctctttgtgttcattgccctgggtaggtg

SEQ ID NO: 2398 - RNA, 30 nt, synthetic construct
  source 1..30: mol_type = other RNA
gctctttgtgttcattgccctgggaagatg

SEQ ID NO: 2399 - RNA, 30 nt, synthetic construct
  source 1..30: mol_type = other RNA
gctctttgtgttcattgccctgggtcggtg

SEQ ID NO: 2400 - RNA, 30 nt, synthetic construct
  source 1..30: mol_type = other RNA
gctctttgtgttcattgccctggggcggtg

SEQ ID NO: 2401 - RNA, 30 nt, synthetic construct
  source 1..30: mol_type = other RNA
gctctttgtgttcattgccctgggacggtg

SEQ ID NO: 2402 - RNA, 30 nt, synthetic construct
  source 1..30: mol_type = other RNA
gctctttgtgttcattgccctgggaaggtg

SEQ ID NO: 2403 - RNA, 30 nt, synthetic construct
  source 1..30: mol_type = other RNA
gctctttgtgttcattgccctgggcagatg

SEQ ID NO: 2404 - RNA, 31 nt, synthetic construct
  source 1..31: mol_type = other RNA
tgctctttgtgttcattgccctgggtagatg

SEQ ID NO: 2405 - RNA, 31 nt, synthetic construct
  source 1..31: mol_type = other RNA
tgctctttgtgttcattgccctgggaagatg

SEQ ID NO: 2406 - RNA, 31 nt, synthetic construct
  source 1..31: mol_type = other RNA
tgctctttgtgttcattgccctgggccggtg

SEQ ID NO: 2407 - RNA, 31 nt, synthetic construct
  source 1..31: mol_type = other RNA
tgctctttgtgttcattgccctgggaaggtg

SEQ ID NO: 2408 - RNA, 31 nt, synthetic construct
  source 1..31: mol_type = other RNA
tgctctttgtgttcattgccctggggcggtg

SEQ ID NO: 2409 - RNA, 31 nt, synthetic construct
  source 1..31: mol_type = other RNA
tgctctttgtgttcattgccctggggagatg

SEQ ID NO: 2410 - RNA, 31 nt, synthetic construct
  source 1..31: mol_type = other RNA
tgctctttgtgttcattgccctgggacggtg

SEQ ID NO: 2411 - RNA, 31 nt, synthetic construct
  source 1..31: mol_type = other RNA
tgctctttgtgttcattgccctggggaggtg

SEQ ID NO: 2412 - RNA, 31 nt, synthetic construct
  source 1..31: mol_type = other RNA
tgctctttgtgttcattgccctgggcagatg

SEQ ID NO: 2413 - RNA, 31 nt, synthetic construct
  source 1..31: mol_type = other RNA
tgctctttgtgttcattgccctgggcaggtg

SEQ ID NO: 2414 - RNA, 31 nt, synthetic construct
  source 1..31: mol_type = other RNA
tgctctttgtgttcattgccctgggtcggtg

SEQ ID NO: 2415 - RNA, 31 nt, synthetic construct
  source 1..31: mol_type = other RNA
tgctctttgtgttcattgccctgggtaggtg

SEQ ID NO: 2416 - RNA, 32 nt, synthetic construct
  source 1..32: mol_type = other RNA
atgctctttgtgttcattgccctgggtagatg

SEQ ID NO: 2417 - RNA, 32 nt, synthetic construct
  source 1..32: mol_type = other RNA
atgctctttgtgttcattgccctggggaggtg

SEQ ID NO: 2418 - RNA, 32 nt, synthetic construct
  source 1..32: mol_type = other RNA
atgctctttgtgttcattgccctggggcggtg

SEQ ID NO: 2419 - RNA, 32 nt, synthetic construct
  source 1..32: mol_type = other RNA
atgctctttgtgttcattgccctgggaaggtg

SEQ ID NO: 2420 - RNA, 32 nt, synthetic construct
  source 1..32: mol_type = other RNA
atgctctttgtgttcattgccctgggcagatg

SEQ ID NO: 2421 - RNA, 32 nt, synthetic construct
  source 1..32: mol_type = other RNA
atgctctttgtgttcattgccctgggtcggtg

SEQ ID NO: 2422 - RNA, 32 nt, synthetic construct
  source 1..32: mol_type = other RNA
atgctctttgtgttcattgccctgggacggtg

SEQ ID NO: 2423 - RNA, 32 nt, synthetic construct
  source 1..32: mol_type = other RNA
atgctctttgtgttcattgccctgggccggtg

SEQ ID NO: 2424 - RNA, 32 nt, synthetic construct
  source 1..32: mol_type = other RNA
atgctctttgtgttcattgccctgggcaggtg

SEQ ID NO: 2425 - RNA, 32 nt, synthetic construct
  source 1..32: mol_type = other RNA
atgctctttgtgttcattgccctggggagatg

SEQ ID NO: 2426 - RNA, 32 nt, synthetic construct
  source 1..32: mol_type = other RNA
atgctctttgtgttcattgccctgggaagatg

SEQ ID NO: 2427 - RNA, 32 nt, synthetic construct
  source 1..32: mol_type = other RNA
atgctctttgtgttcattgccctgggtaggtg

SEQ ID NO: 2428 - RNA, 33 nt, synthetic construct
  source 1..33: mol_type = other RNA
catgctctttgtgttcattgccctgggcagatg

SEQ ID NO: 2429 - RNA, 33 nt, synthetic construct
  source 1..33: mol_type = other RNA
catgctctttgtgttcattgccctgggaaggtg

SEQ ID NO: 2430 - RNA, 33 nt, synthetic construct
  source 1..33: mol_type = other RNA
catgctctttgtgttcattgccctgggtcggtg

SEQ ID NO: 2431 - RNA, 33 nt, synthetic construct
  source 1..33: mol_type = other RNA
catgctctttgtgttcattgccctgggtagatg

SEQ ID NO: 2432 - RNA, 33 nt, synthetic construct
  source 1..33: mol_type = other RNA
catgctctttgtgttcattgccctgggtaggtg

SEQ ID NO: 2433 - RNA, 33 nt, synthetic construct
  source 1..33: mol_type = other RNA
catgctctttgtgttcattgccctggggaggtg

SEQ ID NO: 2434 - RNA, 33 nt, synthetic construct
  source 1..33: mol_type = other RNA
catgctctttgtgttcattgccctggggcggtg

SEQ ID NO: 2435 - RNA, 33 nt, synthetic construct
  source 1..33: mol_type = other RNA
catgctctttgtgttcattgccctgggaagatg

SEQ ID NO: 2436 - RNA, 33 nt, synthetic construct
  source 1..33: mol_type = other RNA
catgctctttgtgttcattgccctgggccggtg

SEQ ID NO: 2437 - RNA, 33 nt, synthetic construct
  source 1..33: mol_type = other RNA
catgctctttgtgttcattgccctgggcaggtg

SEQ ID NO: 2438 - RNA, 33 nt, synthetic construct
  source 1..33: mol_type = other RNA
catgctctttgtgttcattgccctgggacggtg

SEQ ID NO: 2439 - RNA, 33 nt, synthetic construct
  source 1..33: mol_type = other RNA
catgctctttgtgttcattgccctggggagatg

SEQ ID NO: 2440 - RNA, 34 nt, synthetic construct
  source 1..34: mol_type = other RNA
ccatgctctttgtgttcattgccctgggacggtg

SEQ ID NO: 2441 - RNA, 34 nt, synthetic construct
  source 1..34: mol_type = other RNA
ccatgctctttgtgttcattgccctgggtaggtg

SEQ ID NO: 2442 - RNA, 34 nt, synthetic construct
  source 1..34: mol_type = other RNA
ccatgctctttgtgttcattgccctgggaagatg

SEQ ID NO: 2443 - RNA, 34 nt, synthetic construct
  source 1..34: mol_type = other RNA
ccatgctctttgtgttcattgccctgggcaggtg

SEQ ID NO: 2444 - RNA, 34 nt, synthetic construct
  source 1..34: mol_type = other RNA
ccatgctctttgtgttcattgccctgggtagatg

SEQ ID NO: 2445 - RNA, 34 nt, synthetic construct
  source 1..34: mol_type = other RNA
ccatgctctttgtgttcattgccctggggaggtg

SEQ ID NO: 2446 - RNA, 34 nt, synthetic construct
  source 1..34: mol_type = other RNA
ccatgctctttgtgttcattgccctgggcagatg

SEQ ID NO: 2447 - RNA, 34 nt, synthetic construct
  source 1..34: mol_type = other RNA
ccatgctctttgtgttcattgccctgggccggtg

SEQ ID NO: 2448 - RNA, 34 nt, synthetic construct
  source 1..34: mol_type = other RNA
ccatgctctttgtgttcattgccctgggaaggtg

SEQ ID NO: 2449 - RNA, 34 nt, synthetic construct
  source 1..34: mol_type = other RNA
ccatgctctttgtgttcattgccctggggcggtg

SEQ ID NO: 2450 - RNA, 34 nt, synthetic construct
  source 1..34: mol_type = other RNA
ccatgctctttgtgttcattgccctgggtcggtg

SEQ ID NO: 2451 - RNA, 34 nt, synthetic construct
  source 1..34: mol_type = other RNA
ccatgctctttgtgttcattgccctggggagatg

SEQ ID NO: 2452 - RNA, 35 nt, synthetic construct
  source 1..35: mol_type = other RNA
cccatgctctttgtgttcattgccctgggtaggtg

SEQ ID NO: 2453 - RNA, 35 nt, synthetic construct
  source 1..35: mol_type = other RNA
cccatgctctttgtgttcattgccctgggcagatg

SEQ ID NO: 2454 - RNA, 35 nt, synthetic construct
  source 1..35: mol_type = other RNA
cccatgctctttgtgttcattgccctgggccggtg

SEQ ID NO: 2455 - RNA, 35 nt, synthetic construct
  source 1..35: mol_type = other RNA
cccatgctctttgtgttcattgccctgggaaggtg

SEQ ID NO: 2456 - RNA, 35 nt, synthetic construct
  source 1..35: mol_type = other RNA
cccatgctctttgtgttcattgccctggggagatg

SEQ ID NO: 2457 - RNA, 35 nt, synthetic construct
  source 1..35: mol_type = other RNA
cccatgctctttgtgttcattgccctgggaagatg

SEQ ID NO: 2458 - RNA, 35 nt, synthetic construct
  source 1..35: mol_type = other RNA
cccatgctctttgtgttcattgccctgggtagatg

SEQ ID NO: 2459 - RNA, 35 nt, synthetic construct
  source 1..35: mol_type = other RNA
cccatgctctttgtgttcattgccctgggcaggtg

SEQ ID NO: 2460 - RNA, 35 nt, synthetic construct
  source 1..35: mol_type = other RNA
cccatgctctttgtgttcattgccctgggacggtg

SEQ ID NO: 2461 - RNA, 35 nt, synthetic construct
  source 1..35: mol_type = other RNA
cccatgctctttgtgttcattgccctgggtcggtg

SEQ ID NO: 2462 - RNA, 35 nt, synthetic construct
  source 1..35: mol_type = other RNA
cccatgctctttgtgttcattgccctggggaggtg

SEQ ID NO: 2463 - RNA, 35 nt, synthetic construct
  source 1..35: mol_type = other RNA
cccatgctctttgtgttcattgccctggggcggtg

SEQ ID NO: 2464 - RNA, 36 nt, synthetic construct
  source 1..36: mol_type = other RNA
ccccatgctctttgtgttcattgccctgggtaggtg

SEQ ID NO: 2465 - RNA, 36 nt, synthetic construct
  source 1..36: mol_type = other RNA
ccccatgctctttgtgttcattgccctgggaagatg

SEQ ID NO: 2466 - RNA, 36 nt, synthetic construct
  source 1..36: mol_type = other RNA
ccccatgctctttgtgttcattgccctggggcggtg

SEQ ID NO: 2467 - RNA, 36 nt, synthetic construct
  source 1..36: mol_type = other RNA
ccccatgctctttgtgttcattgccctgggacggtg

SEQ ID NO: 2468 - RNA, 36 nt, synthetic construct
  source 1..36: mol_type = other RNA
ccccatgctctttgtgttcattgccctgggtcggtg

SEQ ID NO: 2469 - RNA, 36 nt, synthetic construct
  source 1..36: mol_type = other RNA
ccccatgctctttgtgttcattgccctgggccggtg

SEQ ID NO: 2470 - RNA, 36 nt, synthetic construct
  source 1..36: mol_type = other RNA
ccccatgctctttgtgttcattgccctggggaggtg

SEQ ID NO: 2471 - RNA, 36 nt, synthetic construct
  source 1..36: mol_type = other RNA
ccccatgctctttgtgttcattgccctgggaaggtg

SEQ ID NO: 2472 - RNA, 36 nt, synthetic construct
  source 1..36: mol_type = other RNA
ccccatgctctttgtgttcattgccctgggcaggtg

SEQ ID NO: 2473 - RNA, 36 nt, synthetic construct
  source 1..36: mol_type = other RNA
ccccatgctctttgtgttcattgccctgggcagatg

SEQ ID NO: 2474 - RNA, 36 nt, synthetic construct
  source 1..36: mol_type = other RNA
ccccatgctctttgtgttcattgccctgggtagatg

SEQ ID NO: 2475 - RNA, 36 nt, synthetic construct
  source 1..36: mol_type = other RNA
ccccatgctctttgtgttcattgccctggggagatg

SEQ ID NO: 2476 - RNA, 37 nt, synthetic construct
  source 1..37: mol_type = other RNA
cccccatgctctttgtgttcattgccctgggtaggtg

SEQ ID NO: 2477 - RNA, 37 nt, synthetic construct
  source 1..37: mol_type = other RNA
cccccatgctctttgtgttcattgccctgggtcggtg

SEQ ID NO: 2478 - RNA, 37 nt, synthetic construct
  source 1..37: mol_type = other RNA
cccccatgctctttgtgttcattgccctgggcagatg

SEQ ID NO: 2479 - RNA, 37 nt, synthetic construct
  source 1..37: mol_type = other RNA
cccccatgctctttgtgttcattgccctggggaggtg

SEQ ID NO: 2480 - RNA, 37 nt, synthetic construct
  source 1..37: mol_type = other RNA
cccccatgctctttgtgttcattgccctgggcaggtg

SEQ ID NO: 2481 - RNA, 37 nt, synthetic construct
  source 1..37: mol_type = other RNA
cccccatgctctttgtgttcattgccctgggtagatg

SEQ ID NO: 2482 - RNA, 37 nt, synthetic construct
  source 1..37: mol_type = other RNA
cccccatgctctttgtgttcattgccctgggacggtg

SEQ ID NO: 2483 - RNA, 37 nt, synthetic construct
  source 1..37: mol_type = other RNA
cccccatgctctttgtgttcattgccctggggcggtg

SEQ ID NO: 2484 - RNA, 37 nt, synthetic construct
  source 1..37: mol_type = other RNA
cccccatgctctttgtgttcattgccctggggagatg

SEQ ID NO: 2485 - RNA, 37 nt, synthetic construct
  source 1..37: mol_type = other RNA
cccccatgctctttgtgttcattgccctgggaagatg

SEQ ID NO: 2486 - RNA, 37 nt, synthetic construct
  source 1..37: mol_type = other RNA
cccccatgctctttgtgttcattgccctgggaaggtg

SEQ ID NO: 2487 - RNA, 37 nt, synthetic construct
  source 1..37: mol_type = other RNA
cccccatgctctttgtgttcattgccctgggccggtg

SEQ ID NO: 2488 - RNA, 38 nt, synthetic construct
  source 1..38: mol_type = other RNA
ccccccatgctctttgtgttcattgccctgggaagatg

SEQ ID NO: 2489 - RNA, 38 nt, synthetic construct
  source 1..38: mol_type = other RNA
ccccccatgctctttgtgttcattgccctgggtagatg

SEQ ID NO: 2490 - RNA, 38 nt, synthetic construct
  source 1..38: mol_type = other RNA
ccccccatgctctttgtgttcattgccctgggtaggtg

SEQ ID NO: 2491 - RNA, 38 nt, synthetic construct
  source 1..38: mol_type = other RNA
ccccccatgctctttgtgttcattgccctgggacggtg

SEQ ID NO: 2492 - RNA, 38 nt, synthetic construct
  source 1..38: mol_type = other RNA
ccccccatgctctttgtgttcattgccctggggaggtg

SEQ ID NO: 2493 - RNA, 38 nt, synthetic construct
  source 1..38: mol_type = other RNA
ccccccatgctctttgtgttcattgccctggggcggtg

SEQ ID NO: 2494 - RNA, 38 nt, synthetic construct
  source 1..38: mol_type = other RNA
ccccccatgctctttgtgttcattgccctgggccggtg

SEQ ID NO: 2495 - RNA, 38 nt, synthetic construct
  source 1..38: mol_type = other RNA
ccccccatgctctttgtgttcattgccctgggcagatg

SEQ ID NO: 2496 - RNA, 38 nt, synthetic construct
  source 1..38: mol_type = other RNA
ccccccatgctctttgtgttcattgccctgggtcggtg

SEQ ID NO: 2497 - RNA, 38 nt, synthetic construct
  source 1..38: mol_type = other RNA
ccccccatgctctttgtgttcattgccctgggaaggtg

SEQ ID NO: 2498 - RNA, 38 nt, synthetic construct
  source 1..38: mol_type = other RNA
ccccccatgctctttgtgttcattgccctggggagatg

SEQ ID NO: 2499 - RNA, 38 nt, synthetic construct
  source 1..38: mol_type = other RNA
ccccccatgctctttgtgttcattgccctgggcaggtg

SEQ ID NO: 2500 - RNA, 39 nt, synthetic construct
  source 1..39: mol_type = other RNA
gccccccatgctctttgtgttcattgccctggggcggtg

SEQ ID NO: 2501 - RNA, 39 nt, synthetic construct
  source 1..39: mol_type = other RNA
gccccccatgctctttgtgttcattgccctggggagatg

SEQ ID NO: 2502 - RNA, 39 nt, synthetic construct
  source 1..39: mol_type = other RNA
gccccccatgctctttgtgttcattgccctgggaaggtg

SEQ ID NO: 2503 - RNA, 39 nt, synthetic construct
  source 1..39: mol_type = other RNA
gccccccatgctctttgtgttcattgccctgggccggtg

SEQ ID NO: 2504 - RNA, 39 nt, synthetic construct
  source 1..39: mol_type = other RNA
gccccccatgctctttgtgttcattgccctgggacggtg

SEQ ID NO: 2505 - RNA, 39 nt, synthetic construct
  source 1..39: mol_type = other RNA
gccccccatgctctttgtgttcattgccctgggcaggtg

SEQ ID NO: 2506 - RNA, 39 nt, synthetic construct
  source 1..39: mol_type = other RNA
gccccccatgctctttgtgttcattgccctgggaagatg

SEQ ID NO: 2507 - RNA, 39 nt, synthetic construct
  source 1..39: mol_type = other RNA
gccccccatgctctttgtgttcattgccctgggtagatg

SEQ ID NO: 2508 - RNA, 39 nt, synthetic construct
  source 1..39: mol_type = other RNA
gccccccatgctctttgtgttcattgccctggggaggtg

SEQ ID NO: 2509 - RNA, 39 nt, synthetic construct
  source 1..39: mol_type = other RNA
gccccccatgctctttgtgttcattgccctgggtcggtg

SEQ ID NO: 2510 - RNA, 39 nt, synthetic construct
  source 1..39: mol_type = other RNA
gccccccatgctctttgtgttcattgccctgggcagatg

SEQ ID NO: 2511 - RNA, 39 nt, synthetic construct
  source 1..39: mol_type = other RNA
gccccccatgctctttgtgttcattgccctgggtaggtg

SEQ ID NO: 2512 - RNA, 40 nt, synthetic construct
  source 1..40: mol_type = other RNA
cgccccccatgctctttgtgttcattgccctggggagatg

SEQ ID NO: 2513 - RNA, 40 nt, synthetic construct
  source 1..40: mol_type = other RNA
cgccccccatgctctttgtgttcattgccctgggaaggtg

SEQ ID NO: 2514 - RNA, 40 nt, synthetic construct
  source 1..40: mol_type = other RNA
cgccccccatgctctttgtgttcattgccctgggtcggtg

SEQ ID NO: 2515 - RNA, 40 nt, synthetic construct
  source 1..40: mol_type = other RNA
cgccccccatgctctttgtgttcattgccctggggcggtg

SEQ ID NO: 2516 - RNA, 40 nt, synthetic construct
  source 1..40: mol_type = other RNA
cgccccccatgctctttgtgttcattgccctgggcagatg

SEQ ID NO: 2517 - RNA, 40 nt, synthetic construct
  source 1..40: mol_type = other RNA
cgccccccatgctctttgtgttcattgccctggggaggtg

SEQ ID NO: 2518 - RNA, 40 nt, synthetic construct
  source 1..40: mol_type = other RNA
cgccccccatgctctttgtgttcattgccctgggacggtg

SEQ ID NO: 2519 - RNA, 40 nt, synthetic construct
  source 1..40: mol_type = other RNA
cgccccccatgctctttgtgttcattgccctgggtagatg

SEQ ID NO: 2520 - RNA, 40 nt, synthetic construct
  source 1..40: mol_type = other RNA
cgccccccatgctctttgtgttcattgccctgggaagatg

SEQ ID NO: 2521 - RNA, 40 nt, synthetic construct
  source 1..40: mol_type = other RNA
cgccccccatgctctttgtgttcattgccctgggtaggtg

SEQ ID NO: 2522 - RNA, 40 nt, synthetic construct
  source 1..40: mol_type = other RNA
cgccccccatgctctttgtgttcattgccctgggccggtg

SEQ ID NO: 2523 - RNA, 40 nt, synthetic construct
  source 1..40: mol_type = other RNA
cgccccccatgctctttgtgttcattgccctgggcaggtg

SEQ ID NO: 2524 - RNA, 41 nt, synthetic construct
  source 1..41: mol_type = other RNA
acgccccccatgctctttgtgttcattgccctgggcaggtg

SEQ ID NO: 2525 - RNA, 41 nt, synthetic construct
  source 1..41: mol_type = other RNA
acgccccccatgctctttgtgttcattgccctggggaggtg

SEQ ID NO: 2526 - RNA, 41 nt, synthetic construct
  source 1..41: mol_type = other RNA
acgccccccatgctctttgtgttcattgccctgggtagatg

SEQ ID NO: 2527 - RNA, 41 nt, synthetic construct
  source 1..41: mol_type = other RNA
acgccccccatgctctttgtgttcattgccctgggcagatg

SEQ ID NO: 2528 - RNA, 41 nt, synthetic construct
  source 1..41: mol_type = other RNA
acgccccccatgctctttgtgttcattgccctgggacggtg

SEQ ID NO: 2529 - RNA, 41 nt, synthetic construct
  source 1..41: mol_type = other RNA
acgccccccatgctctttgtgttcattgccctggggagatg

SEQ ID NO: 2530 - RNA, 41 nt, synthetic construct
  source 1..41: mol_type = other RNA
acgccccccatgctctttgtgttcattgccctgggtcggtg

SEQ ID NO: 2531 - RNA, 41 nt, synthetic construct
  source 1..41: mol_type = other RNA
acgccccccatgctctttgtgttcattgccctggggcggtg

SEQ ID NO: 2532 - RNA, 41 nt, synthetic construct
  source 1..41: mol_type = other RNA
acgccccccatgctctttgtgttcattgccctgggaaggtg

SEQ ID NO: 2533 - RNA, 41 nt, synthetic construct
  source 1..41: mol_type = other RNA
acgccccccatgctctttgtgttcattgccctgggccggtg

SEQ ID NO: 2534 - RNA, 41 nt, synthetic construct
  source 1..41: mol_type = other RNA
acgccccccatgctctttgtgttcattgccctgggtaggtg

SEQ ID NO: 2535 - RNA, 41 nt, synthetic construct
  source 1..41: mol_type = other RNA
acgccccccatgctctttgtgttcattgccctgggaagatg

SEQ ID NO: 2536 - RNA, 42 nt, synthetic construct
  source 1..42: mol_type = other RNA
cacgccccccatgctctttgtgttcattgccctgggcagatg

SEQ ID NO: 2537 - RNA, 42 nt, synthetic construct
  source 1..42: mol_type = other RNA
cacgccccccatgctctttgtgttcattgccctgggacggtg

SEQ ID NO: 2538 - RNA, 42 nt, synthetic construct
  source 1..42: mol_type = other RNA
cacgccccccatgctctttgtgttcattgccctgggcaggtg

SEQ ID NO: 2539 - RNA, 42 nt, synthetic construct
  source 1..42: mol_type = other RNA
cacgccccccatgctctttgtgttcattgccctgggtaggtg

SEQ ID NO: 2540 - RNA, 42 nt, synthetic construct
  source 1..42: mol_type = other RNA
cacgccccccatgctctttgtgttcattgccctggggagatg

SEQ ID NO: 2541 - RNA, 42 nt, synthetic construct
  source 1..42: mol_type = other RNA
cacgccccccatgctctttgtgttcattgccctgggtcggtg

SEQ ID NO: 2542 - RNA, 42 nt, synthetic construct
  source 1..42: mol_type = other RNA
cacgccccccatgctctttgtgttcattgccctggggaggtg

SEQ ID NO: 2543 - RNA, 42 nt, synthetic construct
  source 1..42: mol_type = other RNA
cacgccccccatgctctttgtgttcattgccctgggtagatg

SEQ ID NO: 2544 - RNA, 42 nt, synthetic construct
  source 1..42: mol_type = other RNA
cacgccccccatgctctttgtgttcattgccctgggaagatg

SEQ ID NO: 2545 - RNA, 42 nt, synthetic construct
  source 1..42: mol_type = other RNA
cacgccccccatgctctttgtgttcattgccctggggcggtg

SEQ ID NO: 2546 - RNA, 42 nt, synthetic construct
  source 1..42: mol_type = other RNA
cacgccccccatgctctttgtgttcattgccctgggccggtg

SEQ ID NO: 2547 - RNA, 42 nt, synthetic construct
  source 1..42: mol_type = other RNA
cacgccccccatgctctttgtgttcattgccctgggaaggtg

SEQ ID NO: 2548 - RNA, 43 nt, synthetic construct
  source 1..43: mol_type = other RNA
acacgccccccatgctctttgtgttcattgccctggggcggtg

SEQ ID NO: 2549 - RNA, 43 nt, synthetic construct
  source 1..43: mol_type = other RNA
acacgccccccatgctctttgtgttcattgccctggggaggtg

SEQ ID NO: 2550 - RNA, 43 nt, synthetic construct
  source 1..43: mol_type = other RNA
acacgccccccatgctctttgtgttcattgccctgggtagatg

SEQ ID NO: 2551 - RNA, 43 nt, synthetic construct
  source 1..43: mol_type = other RNA
acacgccccccatgctctttgtgttcattgccctgggaaggtg

SEQ ID NO: 2552 - RNA, 43 nt, synthetic construct
  source 1..43: mol_type = other RNA
acacgccccccatgctctttgtgttcattgccctgggcagatg

SEQ ID NO: 2553 - RNA, 43 nt, synthetic construct
  source 1..43: mol_type = other RNA
acacgccccccatgctctttgtgttcattgccctgggacggtg

SEQ ID NO: 2554 - RNA, 43 nt, synthetic construct
  source 1..43: mol_type = other RNA
acacgccccccatgctctttgtgttcattgccctgggcaggtg

SEQ ID NO: 2555 - RNA, 43 nt, synthetic construct
  source 1..43: mol_type = other RNA
acacgccccccatgctctttgtgttcattgccctgggtaggtg

SEQ ID NO: 2556 - RNA, 43 nt, synthetic construct
  source 1..43: mol_type = other RNA
acacgccccccatgctctttgtgttcattgccctgggaagatg

SEQ ID NO: 2557 - RNA, 43 nt, synthetic construct
  source 1..43: mol_type = other RNA
acacgccccccatgctctttgtgttcattgccctggggagatg

SEQ ID NO: 2558 - RNA, 43 nt, synthetic construct
  source 1..43: mol_type = other RNA
acacgccccccatgctctttgtgttcattgccctgggtcggtg

SEQ ID NO: 2559 - RNA, 43 nt, synthetic construct
  source 1..43: mol_type = other RNA
acacgccccccatgctctttgtgttcattgccctgggccggtg

SEQ ID NO: 2560 - RNA, 44 nt, synthetic construct
  source 1..44: mol_type = other RNA
gacacgccccccatgctctttgtgttcattgccctgggacggtg

SEQ ID NO: 2561 - RNA, 44 nt, synthetic construct
  source 1..44: mol_type = other RNA
gacacgccccccatgctctttgtgttcattgccctggggaggtg

SEQ ID NO: 2562 - RNA, 44 nt, synthetic construct
  source 1..44: mol_type = other RNA
gacacgccccccatgctctttgtgttcattgccctgggcagatg

SEQ ID NO: 2563 - RNA, 44 nt, synthetic construct
  source 1..44: mol_type = other RNA
gacacgccccccatgctctttgtgttcattgccctgggaagatg

SEQ ID NO: 2564 - RNA, 44 nt, synthetic construct
  source 1..44: mol_type = other RNA
gacacgccccccatgctctttgtgttcattgccctgggaaggtg

SEQ ID NO: 2565 - RNA, 44 nt, synthetic construct
  source 1..44: mol_type = other RNA
gacacgccccccatgctctttgtgttcattgccctggggcggtg

SEQ ID NO: 2566 - RNA, 44 nt, synthetic construct
  source 1..44: mol_type = other RNA
gacacgccccccatgctctttgtgttcattgccctgggtcggtg

SEQ ID NO: 2567 - RNA, 44 nt, synthetic construct
  source 1..44: mol_type = other RNA
gacacgccccccatgctctttgtgttcattgccctgggccggtg

SEQ ID NO: 2568 - RNA, 44 nt, synthetic construct
  source 1..44: mol_type = other RNA
gacacgccccccatgctctttgtgttcattgccctggggagatg

SEQ ID NO: 2569 - RNA, 44 nt, synthetic construct
  source 1..44: mol_type = other RNA
gacacgccccccatgctctttgtgttcattgccctgggtaggtg

SEQ ID NO: 2570 - RNA, 44 nt, synthetic construct
  source 1..44: mol_type = other RNA
gacacgccccccatgctctttgtgttcattgccctgggcaggtg

SEQ ID NO: 2571 - RNA, 44 nt, synthetic construct
  source 1..44: mol_type = other RNA
gacacgccccccatgctctttgtgttcattgccctgggtagatg

SEQ ID NO: 2572 - RNA, 45 nt, synthetic construct
  source 1..45: mol_type = other RNA
cgacacgccccccatgctctttgtgttcattgccctgggtcggtg

SEQ ID NO: 2573 - RNA, 45 nt, synthetic construct
  source 1..45: mol_type = other RNA
cgacacgccccccatgctctttgtgttcattgccctgggtaggtg

SEQ ID NO: 2574 - RNA, 45 nt, synthetic construct
  source 1..45: mol_type = other RNA
cgacacgccccccatgctctttgtgttcattgccctggggagatg

SEQ ID NO: 2575 - RNA, 45 nt, synthetic construct
  source 1..45: mol_type = other RNA
cgacacgccccccatgctctttgtgttcattgccctgggacggtg

SEQ ID NO: 2576 - RNA, 45 nt, synthetic construct
  source 1..45: mol_type = other RNA
cgacacgccccccatgctctttgtgttcattgccctgggccggtg

SEQ ID NO: 2577 - RNA, 45 nt, synthetic construct
  source 1..45: mol_type = other RNA
cgacacgccccccatgctctttgtgttcattgccctgggaaggtg

SEQ ID NO: 2578 - RNA, 45 nt, synthetic construct
  source 1..45: mol_type = other RNA
cgacacgccccccatgctctttgtgttcattgccctgggaagatg

SEQ ID NO: 2579 - RNA, 45 nt, synthetic construct
  source 1..45: mol_type = other RNA
cgacacgccccccatgctctttgtgttcattgccctgggtagatg

SEQ ID NO: 2580 - RNA, 45 nt, synthetic construct
  source 1..45: mol_type = other RNA
cgacacgccccccatgctctttgtgttcattgccctgggcagatg

SEQ ID NO: 2581 - RNA, 45 nt, synthetic construct
  source 1..45: mol_type = other RNA
cgacacgccccccatgctctttgtgttcattgccctggggaggtg

SEQ ID NO: 2582 - RNA, 45 nt, synthetic construct
  source 1..45: mol_type = other RNA
cgacacgccccccatgctctttgtgttcattgccctggggcggtg

SEQ ID NO: 2583 - RNA, 45 nt, synthetic construct
  source 1..45: mol_type = other RNA
cgacacgccccccatgctctttgtgttcattgccctgggcaggtg

SEQ ID NO: 2584 - RNA, 46 nt, synthetic construct
  source 1..46: mol_type = other RNA
tcgacacgccccccatgctctttgtgttcattgccctgggaaggtg

SEQ ID NO: 2585 - RNA, 46 nt, synthetic construct
  source 1..46: mol_type = other RNA
tcgacacgccccccatgctctttgtgttcattgccctgggtagatg

SEQ ID NO: 2586 - RNA, 46 nt, synthetic construct
  source 1..46: mol_type = other RNA
tcgacacgccccccatgctctttgtgttcattgccctgggaagatg

SEQ ID NO: 2587 - RNA, 46 nt, synthetic construct
  source 1..46: mol_type = other RNA
tcgacacgccccccatgctctttgtgttcattgccctgggccggtg

SEQ ID NO: 2588 - RNA, 46 nt, synthetic construct
  source 1..46: mol_type = other RNA
tcgacacgccccccatgctctttgtgttcattgccctgggacggtg

SEQ ID NO: 2589 - RNA, 46 nt, synthetic construct
  source 1..46: mol_type = other RNA
tcgacacgccccccatgctctttgtgttcattgccctgggcaggtg

SEQ ID NO: 2590 - RNA, 46 nt, synthetic construct
  source 1..46: mol_type = other RNA
tcgacacgccccccatgctctttgtgttcattgccctgggcagatg

SEQ ID NO: 2591 - RNA, 46 nt, synthetic construct
  source 1..46: mol_type = other RNA
tcgacacgccccccatgctctttgtgttcattgccctggggcggtg

SEQ ID NO: 2592 - RNA, 46 nt, synthetic construct
  source 1..46: mol_type = other RNA
tcgacacgccccccatgctctttgtgttcattgccctggggaggtg

SEQ ID NO: 2593 - RNA, 46 nt, synthetic construct
  source 1..46: mol_type = other RNA
tcgacacgccccccatgctctttgtgttcattgccctgggtaggtg

SEQ ID NO: 2594 - RNA, 46 nt, synthetic construct
  source 1..46: mol_type = other RNA
tcgacacgccccccatgctctttgtgttcattgccctgggtcggtg

SEQ ID NO: 2595 - RNA, 46 nt, synthetic construct
  source 1..46: mol_type = other RNA
tcgacacgccccccatgctctttgtgttcattgccctggggagatg

SEQ ID NO: 2596 - RNA, 47 nt, synthetic construct
  source 1..47: mol_type = other RNA
ttcgacacgccccccatgctctttgtgttcattgccctggggaggtg

SEQ ID NO: 2597 - RNA, 47 nt, synthetic construct
  source 1..47: mol_type = other RNA
ttcgacacgccccccatgctctttgtgttcattgccctgggaagatg

SEQ ID NO: 2598 - RNA, 47 nt, synthetic construct
  source 1..47: mol_type = other RNA
ttcgacacgccccccatgctctttgtgttcattgccctggggagatg

SEQ ID NO: 2599 - RNA, 47 nt, synthetic construct
  source 1..47: mol_type = other RNA
ttcgacacgccccccatgctctttgtgttcattgccctgggtcggtg

SEQ ID NO: 2600 - RNA, 47 nt, synthetic construct
  source 1..47: mol_type = other RNA
ttcgacacgccccccatgctctttgtgttcattgccctgggcagatg

SEQ ID NO: 2601 - RNA, 47 nt, synthetic construct
  source 1..47: mol_type = other RNA
ttcgacacgccccccatgctctttgtgttcattgccctgggccggtg

SEQ ID NO: 2602 - RNA, 47 nt, synthetic construct
  source 1..47: mol_type = other RNA
ttcgacacgccccccatgctctttgtgttcattgccctgggtaggtg

SEQ ID NO: 2603 - RNA, 47 nt, synthetic construct
  source 1..47: mol_type = other RNA
ttcgacacgccccccatgctctttgtgttcattgccctgggacggtg

SEQ ID NO: 2604 - RNA, 47 nt, synthetic construct
  source 1..47: mol_type = other RNA
ttcgacacgccccccatgctctttgtgttcattgccctgggtagatg

SEQ ID NO: 2605 - RNA, 47 nt, synthetic construct
  source 1..47: mol_type = other RNA
ttcgacacgccccccatgctctttgtgttcattgccctgggcaggtg

SEQ ID NO: 2606 - RNA, 47 nt, synthetic construct
  source 1..47: mol_type = other RNA
ttcgacacgccccccatgctctttgtgttcattgccctggggcggtg

SEQ ID NO: 2607 - RNA, 47 nt, synthetic construct
  source 1..47: mol_type = other RNA
ttcgacacgccccccatgctctttgtgttcattgccctgggaaggtg

SEQ ID NO: 2608 - RNA, 48 nt, synthetic construct
  source 1..48: mol_type = other RNA
cttcgacacgccccccatgctctttgtgttcattgccctgggaagatg

SEQ ID NO: 2609 - RNA, 48 nt, synthetic construct
  source 1..48: mol_type = other RNA
cttcgacacgccccccatgctctttgtgttcattgccctgggcagatg

SEQ ID NO: 2610 - RNA, 48 nt, synthetic construct
  source 1..48: mol_type = other RNA
cttcgacacgccccccatgctctttgtgttcattgccctgggcaggtg

SEQ ID NO: 2611 - RNA, 48 nt, synthetic construct
  source 1..48: mol_type = other RNA
cttcgacacgccccccatgctctttgtgttcattgccctgggtcggtg

SEQ ID NO: 2612 - RNA, 48 nt, synthetic construct
  source 1..48: mol_type = other RNA
cttcgacacgccccccatgctctttgtgttcattgccctgggacggtg

SEQ ID NO: 2613 - RNA, 48 nt, synthetic construct
  source 1..48: mol_type = other RNA
cttcgacacgccccccatgctctttgtgttcattgccctggggagatg

SEQ ID NO: 2614 - RNA, 48 nt, synthetic construct
  source 1..48: mol_type = other RNA
cttcgacacgccccccatgctctttgtgttcattgccctggggaggtg

SEQ ID NO: 2615 - RNA, 48 nt, synthetic construct
  source 1..48: mol_type = other RNA
cttcgacacgccccccatgctctttgtgttcattgccctggggcggtg

SEQ ID NO: 2616 - RNA, 48 nt, synthetic construct
  source 1..48: mol_type = other RNA
cttcgacacgccccccatgctctttgtgttcattgccctgggaaggtg

SEQ ID NO: 2617 - RNA, 48 nt, synthetic construct
  source 1..48: mol_type = other RNA
cttcgacacgccccccatgctctttgtgttcattgccctgggtaggtg

SEQ ID NO: 2618 - RNA, 48 nt, synthetic construct
  source 1..48: mol_type = other RNA
cttcgacacgccccccatgctctttgtgttcattgccctgggtagatg

SEQ ID NO: 2619 - RNA, 48 nt, synthetic construct
  source 1..48: mol_type = other RNA
cttcgacacgccccccatgctctttgtgttcattgccctgggccggtg

SEQ ID NO: 2620 - RNA, 49 nt, synthetic construct
  source 1..49: mol_type = other RNA
tcttcgacacgccccccatgctctttgtgttcattgccctgggccggtg

SEQ ID NO: 2621 - RNA, 49 nt, synthetic construct
  source 1..49: mol_type = other RNA
tcttcgacacgccccccatgctctttgtgttcattgccctgggcagatg

SEQ ID NO: 2622 - RNA, 49 nt, synthetic construct
  source 1..49: mol_type = other RNA
tcttcgacacgccccccatgctctttgtgttcattgccctggggcggtg

SEQ ID NO: 2623 - RNA, 49 nt, synthetic construct
  source 1..49: mol_type = other RNA
tcttcgacacgccccccatgctctttgtgttcattgccctgggtcggtg

SEQ ID NO: 2624 - RNA, 49 nt, synthetic construct
  source 1..49: mol_type = other RNA
tcttcgacacgccccccatgctctttgtgttcattgccctgggtaggtg

SEQ ID NO: 2625 - RNA, 49 nt, synthetic construct
  source 1..49: mol_type = other RNA
tcttcgacacgccccccatgctctttgtgttcattgccctggggaggtg

SEQ ID NO: 2626 - RNA, 49 nt, synthetic construct
  source 1..49: mol_type = other RNA
tcttcgacacgccccccatgctctttgtgttcattgccctgggcaggtg

SEQ ID NO: 2627 - RNA, 49 nt, synthetic construct
  source 1..49: mol_type = other RNA
tcttcgacacgccccccatgctctttgtgttcattgccctgggacggtg

SEQ ID NO: 2628 - RNA, 49 nt, synthetic construct
  source 1..49: mol_type = other RNA
tcttcgacacgccccccatgctctttgtgttcattgccctggggagatg

SEQ ID NO: 2629 - RNA, 49 nt, synthetic construct
  source 1..49: mol_type = other RNA
tcttcgacacgccccccatgctctttgtgttcattgccctgggaagatg

SEQ ID NO: 2630 - RNA, 49 nt, synthetic construct
  source 1..49: mol_type = other RNA
tcttcgacacgccccccatgctctttgtgttcattgccctgggaaggtg

SEQ ID NO: 2631 - RNA, 49 nt, synthetic construct
  source 1..49: mol_type = other RNA
tcttcgacacgccccccatgctctttgtgttcattgccctgggtagatg

SEQ ID NO: 2632 - RNA, 50 nt, synthetic construct
  source 1..50: mol_type = other RNA
ttcttcgacacgccccccatgctctttgtgttcattgccctgggtagatg

SEQ ID NO: 2633 - RNA, 50 nt, synthetic construct
  source 1..50: mol_type = other RNA
ttcttcgacacgccccccatgctctttgtgttcattgccctgggaagatg

SEQ ID NO: 2634 - RNA, 50 nt, synthetic construct
  source 1..50: mol_type = other RNA
ttcttcgacacgccccccatgctctttgtgttcattgccctgggcaggtg

SEQ ID NO: 2635 - RNA, 50 nt, synthetic construct
  source 1..50: mol_type = other RNA
ttcttcgacacgccccccatgctctttgtgttcattgccctggggaggtg

SEQ ID NO: 2636 - RNA, 50 nt, synthetic construct
  source 1..50: mol_type = other RNA
ttcttcgacacgccccccatgctctttgtgttcattgccctgggtaggtg

SEQ ID NO: 2637 - RNA, 50 nt, synthetic construct
  source 1..50: mol_type = other RNA
ttcttcgacacgccccccatgctctttgtgttcattgccctgggcagatg

SEQ ID NO: 2638 - RNA, 50 nt, synthetic construct
  source 1..50: mol_type = other RNA
ttcttcgacacgccccccatgctctttgtgttcattgccctgggccggtg

SEQ ID NO: 2639 - RNA, 50 nt, synthetic construct
  source 1..50: mol_type = other RNA
ttcttcgacacgccccccatgctctttgtgttcattgccctggggcggtg

SEQ ID NO: 2640 - RNA, 50 nt, synthetic construct
  source 1..50: mol_type = other RNA
ttcttcgacacgccccccatgctctttgtgttcattgccctggggagatg

SEQ ID NO: 2641 - RNA, 50 nt, synthetic construct
  source 1..50: mol_type = other RNA
ttcttcgacacgccccccatgctctttgtgttcattgccctgggaaggtg

SEQ ID NO: 2642 - RNA, 50 nt, synthetic construct
  source 1..50: mol_type = other RNA
ttcttcgacacgccccccatgctctttgtgttcattgccctgggacggtg

SEQ ID NO: 2643 - RNA, 50 nt, synthetic construct
  source 1..50: mol_type = other RNA
ttcttcgacacgccccccatgctctttgtgttcattgccctgggtcggtg

SEQ ID NO: 2644 - RNA, 51 nt, synthetic construct
  source 1..51: mol_type = other RNA
attcttcgacacgccccccatgctctttgtgttcattgccctgggcagatg

SEQ ID NO: 2645 - RNA, 51 nt, synthetic construct
  source 1..51: mol_type = other RNA
attcttcgacacgccccccatgctctttgtgttcattgccctgggaagatg

SEQ ID NO: 2646 - RNA, 51 nt, synthetic construct
  source 1..51: mol_type = other RNA
attcttcgacacgccccccatgctctttgtgttcattgccctggggcggtg

SEQ ID NO: 2647 - RNA, 51 nt, synthetic construct
  source 1..51: mol_type = other RNA
attcttcgacacgccccccatgctctttgtgttcattgccctgggacggtg

SEQ ID NO: 2648 - RNA, 51 nt, synthetic construct
  source 1..51: mol_type = other RNA
attcttcgacacgccccccatgctctttgtgttcattgccctggggaggtg

SEQ ID NO: 2649 - RNA, 51 nt, synthetic construct
  source 1..51: mol_type = other RNA
attcttcgacacgccccccatgctctttgtgttcattgccctgggtagatg

SEQ ID NO: 2650 - RNA, 51 nt, synthetic construct
  source 1..51: mol_type = other RNA
attcttcgacacgccccccatgctctttgtgttcattgccctgggaaggtg

SEQ ID NO: 2651 - RNA, 51 nt, synthetic construct
  source 1..51: mol_type = other RNA
attcttcgacacgccccccatgctctttgtgttcattgccctgggtcggtg

SEQ ID NO: 2652 - RNA, 51 nt, synthetic construct
  source 1..51: mol_type = other RNA
attcttcgacacgccccccatgctctttgtgttcattgccctgggccggtg

SEQ ID NO: 2653 - RNA, 51 nt, synthetic construct
  source 1..51: mol_type = other RNA
attcttcgacacgccccccatgctctttgtgttcattgccctggggagatg

SEQ ID NO: 2654 - RNA, 51 nt, synthetic construct
  source 1..51: mol_type = other RNA
attcttcgacacgccccccatgctctttgtgttcattgccctgggcaggtg

SEQ ID NO: 2655 - RNA, 51 nt, synthetic construct
  source 1..51: mol_type = other RNA
attcttcgacacgccccccatgctctttgtgttcattgccctgggtaggtg

SEQ ID NO: 2656 - RNA, 52 nt, synthetic construct
  source 1..52: mol_type = other RNA
cattcttcgacacgccccccatgctctttgtgttcattgccctgggtaggtg

SEQ ID NO: 2657 - RNA, 52 nt, synthetic construct
  source 1..52: mol_type = other RNA
cattcttcgacacgccccccatgctctttgtgttcattgccctggggcggtg

SEQ ID NO: 2658 - RNA, 52 nt, synthetic construct
  source 1..52: mol_type = other RNA
cattcttcgacacgccccccatgctctttgtgttcattgccctgggacggtg

SEQ ID NO: 2659 - RNA, 52 nt, synthetic construct
  source 1..52: mol_type = other RNA
cattcttcgacacgccccccatgctctttgtgttcattgccctggggaggtg

SEQ ID NO: 2660 - RNA, 52 nt, synthetic construct
  source 1..52: mol_type = other RNA
cattcttcgacacgccccccatgctctttgtgttcattgccctgggtcggtg

SEQ ID NO: 2661 - RNA, 52 nt, synthetic construct
  source 1..52: mol_type = other RNA
cattcttcgacacgccccccatgctctttgtgttcattgccctgggtagatg

SEQ ID NO: 2662 - RNA, 52 nt, synthetic construct
  source 1..52: mol_type = other RNA
cattcttcgacacgccccccatgctctttgtgttcattgccctgggcagatg

SEQ ID NO: 2663 - RNA, 52 nt, synthetic construct
  source 1..52: mol_type = other RNA
cattcttcgacacgccccccatgctctttgtgttcattgccctgggaagatg

SEQ ID NO: 2664 - RNA, 52 nt, synthetic construct
  source 1..52: mol_type = other RNA
cattcttcgacacgccccccatgctctttgtgttcattgccctgggaaggtg

SEQ ID NO: 2665 - RNA, 52 nt, synthetic construct
  source 1..52: mol_type = other RNA
cattcttcgacacgccccccatgctctttgtgttcattgccctgggccggtg

SEQ ID NO: 2666 - RNA, 52 nt, synthetic construct
  source 1..52: mol_type = other RNA
cattcttcgacacgccccccatgctctttgtgttcattgccctgggcaggtg

SEQ ID NO: 2667 - RNA, 52 nt, synthetic construct
  source 1..52: mol_type = other RNA
cattcttcgacacgccccccatgctctttgtgttcattgccctggggagatg

SEQ ID NO: 2668 - RNA, 53 nt, synthetic construct
  source 1..53: mol_type = other RNA
acattcttcgacacgccccccatgctctttgtgttcattgccctggggaggtg

SEQ ID NO: 2669 - RNA, 53 nt, synthetic construct
  source 1..53: mol_type = other RNA
acattcttcgacacgccccccatgctctttgtgttcattgccctggggcggtg

SEQ ID NO: 2670 - RNA, 53 nt, synthetic construct
  source 1..53: mol_type = other RNA
acattcttcgacacgccccccatgctctttgtgttcattgccctgggaaggtg

SEQ ID NO: 2671 - RNA, 53 nt, synthetic construct
  source 1..53: mol_type = other RNA
acattcttcgacacgccccccatgctctttgtgttcattgccctgggccggtg

SEQ ID NO: 2672 - RNA, 53 nt, synthetic construct
  source 1..53: mol_type = other RNA
acattcttcgacacgccccccatgctctttgtgttcattgccctgggaagatg

SEQ ID NO: 2673 - RNA, 53 nt, synthetic construct
  source 1..53: mol_type = other RNA
acattcttcgacacgccccccatgctctttgtgttcattgccctgggtcggtg

SEQ ID NO: 2674 - RNA, 53 nt, synthetic construct
  source 1..53: mol_type = other RNA
acattcttcgacacgccccccatgctctttgtgttcattgccctggggagatg

SEQ ID NO: 2675 - RNA, 53 nt, synthetic construct
  source 1..53: mol_type = other RNA
acattcttcgacacgccccccatgctctttgtgttcattgccctgggcaggtg

SEQ ID NO: 2676 - RNA, 53 nt, synthetic construct
  source 1..53: mol_type = other RNA
acattcttcgacacgccccccatgctctttgtgttcattgccctgggtaggtg

SEQ ID NO: 2677 - RNA, 53 nt, synthetic construct
  source 1..53: mol_type = other RNA
acattcttcgacacgccccccatgctctttgtgttcattgccctgggtagatg

SEQ ID NO: 2678 - RNA, 53 nt, synthetic construct
  source 1..53: mol_type = other RNA
acattcttcgacacgccccccatgctctttgtgttcattgccctgggacggtg

SEQ ID NO: 2679 - RNA, 53 nt, synthetic construct
  source 1..53: mol_type = other RNA
acattcttcgacacgccccccatgctctttgtgttcattgccctgggcagatg

SEQ ID NO: 2680 - RNA, 54 nt, synthetic construct
  source 1..54: mol_type = other RNA
gacattcttcgacacgccccccatgctctttgtgttcattgccctgggacggtg

SEQ ID NO: 2681 - RNA, 54 nt, synthetic construct
  source 1..54: mol_type = other RNA
gacattcttcgacacgccccccatgctctttgtgttcattgccctggggcggtg

SEQ ID NO: 2682 - RNA, 54 nt, synthetic construct
  source 1..54: mol_type = other RNA
gacattcttcgacacgccccccatgctctttgtgttcattgccctgggccggtg

SEQ ID NO: 2683 - RNA, 54 nt, synthetic construct
  source 1..54: mol_type = other RNA
gacattcttcgacacgccccccatgctctttgtgttcattgccctgggcaggtg

SEQ ID NO: 2684 - RNA, 54 nt, synthetic construct
  source 1..54: mol_type = other RNA
gacattcttcgacacgccccccatgctctttgtgttcattgccctgggcagatg

SEQ ID NO: 2685 - RNA, 54 nt, synthetic construct
  source 1..54: mol_type = other RNA
gacattcttcgacacgccccccatgctctttgtgttcattgccctgggtagatg

SEQ ID NO: 2686 - RNA, 54 nt, synthetic construct
  source 1..54: mol_type = other RNA
gacattcttcgacacgccccccatgctctttgtgttcattgccctgggaaggtg

SEQ ID NO: 2687 - RNA, 54 nt, synthetic construct
  source 1..54: mol_type = other RNA
gacattcttcgacacgccccccatgctctttgtgttcattgccctgggaagatg

SEQ ID NO: 2688 - RNA, 54 nt, synthetic construct
  source 1..54: mol_type = other RNA
gacattcttcgacacgccccccatgctctttgtgttcattgccctgggtaggtg

SEQ ID NO: 2689 - RNA, 54 nt, synthetic construct
  source 1..54: mol_type = other RNA
gacattcttcgacacgccccccatgctctttgtgttcattgccctggggaggtg

SEQ ID NO: 2690 - RNA, 54 nt, synthetic construct
  source 1..54: mol_type = other RNA
gacattcttcgacacgccccccatgctctttgtgttcattgccctggggagatg

SEQ ID NO: 2691 - RNA, 54 nt, synthetic construct
  source 1..54: mol_type = other RNA
gacattcttcgacacgccccccatgctctttgtgttcattgccctgggtcggtg

SEQ ID NO: 2692 - RNA, 55 nt, synthetic construct
  source 1..55: mol_type = other RNA
tgacattcttcgacacgccccccatgctctttgtgttcattgccctgggtaggtg

SEQ ID NO: 2693 - RNA, 55 nt, synthetic construct
  source 1..55: mol_type = other RNA
tgacattcttcgacacgccccccatgctctttgtgttcattgccctgggtcggtg

SEQ ID NO: 2694 - RNA, 55 nt, synthetic construct
  source 1..55: mol_type = other RNA
tgacattcttcgacacgccccccatgctctttgtgttcattgccctgggcaggtg

SEQ ID NO: 2695 - RNA, 55 nt, synthetic construct
  source 1..55: mol_type = other RNA
tgacattcttcgacacgccccccatgctctttgtgttcattgccctgggaagatg

SEQ ID NO: 2696 - RNA, 55 nt, synthetic construct
  source 1..55: mol_type = other RNA
tgacattcttcgacacgccccccatgctctttgtgttcattgccctgggacggtg

SEQ ID NO: 2697 - RNA, 55 nt, synthetic construct
  source 1..55: mol_type = other RNA
tgacattcttcgacacgccccccatgctctttgtgttcattgccctggggaggtg

SEQ ID NO: 2698 - RNA, 55 nt, synthetic construct
  source 1..55: mol_type = other RNA
tgacattcttcgacacgccccccatgctctttgtgttcattgccctggggcggtg

SEQ ID NO: 2699 - RNA, 55 nt, synthetic construct
  source 1..55: mol_type = other RNA
tgacattcttcgacacgccccccatgctctttgtgttcattgccctgggtagatg

SEQ ID NO: 2700 - RNA, 55 nt, synthetic construct
  source 1..55: mol_type = other RNA
tgacattcttcgacacgccccccatgctctttgtgttcattgccctgggaaggtg

SEQ ID NO: 2701 - RNA, 55 nt, synthetic construct
  source 1..55: mol_type = other RNA
tgacattcttcgacacgccccccatgctctttgtgttcattgccctgggccggtg

SEQ ID NO: 2702 - RNA, 55 nt, synthetic construct
  source 1..55: mol_type = other RNA
tgacattcttcgacacgccccccatgctctttgtgttcattgccctggggagatg

SEQ ID NO: 2703 - RNA, 55 nt, synthetic construct
  source 1..55: mol_type = other RNA
tgacattcttcgacacgccccccatgctctttgtgttcattgccctgggcagatg

SEQ ID NO: 2704 - RNA, 56 nt, synthetic construct
  source 1..56: mol_type = other RNA
gtgacattcttcgacacgccccccatgctctttgtgttcattgccctgggaagatg

SEQ ID NO: 2705 - RNA, 56 nt, synthetic construct
  source 1..56: mol_type = other RNA
gtgacattcttcgacacgccccccatgctctttgtgttcattgccctggggagatg

SEQ ID NO: 2706 - RNA, 56 nt, synthetic construct
  source 1..56: mol_type = other RNA
gtgacattcttcgacacgccccccatgctctttgtgttcattgccctgggcaggtg

SEQ ID NO: 2707 - RNA, 56 nt, synthetic construct
  source 1..56: mol_type = other RNA
gtgacattcttcgacacgccccccatgctctttgtgttcattgccctggggcggtg

SEQ ID NO: 2708 - RNA, 56 nt, synthetic construct
  source 1..56: mol_type = other RNA
gtgacattcttcgacacgccccccatgctctttgtgttcattgccctgggtcggtg

SEQ ID NO: 2709 - RNA, 56 nt, synthetic construct
  source 1..56: mol_type = other RNA
gtgacattcttcgacacgccccccatgctctttgtgttcattgccctgggacggtg

SEQ ID NO: 2710 - RNA, 56 nt, synthetic construct
  source 1..56: mol_type = other RNA
gtgacattcttcgacacgccccccatgctctttgtgttcattgccctgggaaggtg

SEQ ID NO: 2711 - RNA, 56 nt, synthetic construct
  source 1..56: mol_type = other RNA
gtgacattcttcgacacgccccccatgctctttgtgttcattgccctggggaggtg

SEQ ID NO: 2712 - RNA, 56 nt, synthetic construct
  source 1..56: mol_type = other RNA
gtgacattcttcgacacgccccccatgctctttgtgttcattgccctgggccggtg

SEQ ID NO: 2713 - RNA, 56 nt, synthetic construct
  source 1..56: mol_type = other RNA
gtgacattcttcgacacgccccccatgctctttgtgttcattgccctgggtaggtg

SEQ ID NO: 2714 - RNA, 56 nt, synthetic construct
  source 1..56: mol_type = other RNA
gtgacattcttcgacacgccccccatgctctttgtgttcattgccctgggtagatg

SEQ ID NO: 2715 - RNA, 56 nt, synthetic construct
  source 1..56: mol_type = other RNA
gtgacattcttcgacacgccccccatgctctttgtgttcattgccctgggcagatg

SEQ ID NO: 2716 - RNA, 57 nt, synthetic construct
  source 1..57: mol_type = other RNA
tgtgacattcttcgacacgccccccatgctctttgtgttcattgccctgggaaggtg

SEQ ID NO: 2717 - RNA, 57 nt, synthetic construct
  source 1..57: mol_type = other RNA
tgtgacattcttcgacacgccccccatgctctttgtgttcattgccctgggcaggtg

SEQ ID NO: 2718 - RNA, 57 nt, synthetic construct
  source 1..57: mol_type = other RNA
tgtgacattcttcgacacgccccccatgctctttgtgttcattgccctgggacggtg

SEQ ID NO: 2719 - RNA, 57 nt, synthetic construct
  source 1..57: mol_type = other RNA
tgtgacattcttcgacacgccccccatgctctttgtgttcattgccctgggtcggtg

SEQ ID NO: 2720 - RNA, 57 nt, synthetic construct
  source 1..57: mol_type = other RNA
tgtgacattcttcgacacgccccccatgctctttgtgttcattgccctgggcagatg

SEQ ID NO: 2721 - RNA, 57 nt, synthetic construct
  source 1..57: mol_type = other RNA
tgtgacattcttcgacacgccccccatgctctttgtgttcattgccctgggaagatg

SEQ ID NO: 2722 - RNA, 57 nt, synthetic construct
  source 1..57: mol_type = other RNA
tgtgacattcttcgacacgccccccatgctctttgtgttcattgccctgggtaggtg

SEQ ID NO: 2723 - RNA, 57 nt, synthetic construct
  source 1..57: mol_type = other RNA
tgtgacattcttcgacacgccccccatgctctttgtgttcattgccctgggtagatg

SEQ ID NO: 2724 - RNA, 57 nt, synthetic construct
  source 1..57: mol_type = other RNA
tgtgacattcttcgacacgccccccatgctctttgtgttcattgccctgggccggtg

SEQ ID NO: 2725 - RNA, 57 nt, synthetic construct
  source 1..57: mol_type = other RNA
tgtgacattcttcgacacgccccccatgctctttgtgttcattgccctggggcggtg

SEQ ID NO: 2726 - RNA, 57 nt, synthetic construct
  source 1..57: mol_type = other RNA
tgtgacattcttcgacacgccccccatgctctttgtgttcattgccctggggagatg

SEQ ID NO: 2727 - RNA, 57 nt, synthetic construct
  source 1..57: mol_type = other RNA
tgtgacattcttcgacacgccccccatgctctttgtgttcattgccctggggaggtg

SEQ ID NO: 2728 - RNA, 58 nt, synthetic construct
  source 1..58: mol_type = other RNA
ctgtgacattcttcgacacgccccccatgctctttgtgttcattgccctgggtcggtg

SEQ ID NO: 2729 - RNA, 58 nt, synthetic construct
  source 1..58: mol_type = other RNA
ctgtgacattcttcgacacgccccccatgctctttgtgttcattgccctgggacggtg

SEQ ID NO: 2730 - RNA, 58 nt, synthetic construct
  source 1..58: mol_type = other RNA
ctgtgacattcttcgacacgccccccatgctctttgtgttcattgccctgggtagatg

SEQ ID NO: 2731 - RNA, 58 nt, synthetic construct
  source 1..58: mol_type = other RNA
ctgtgacattcttcgacacgccccccatgctctttgtgttcattgccctggggagatg

SEQ ID NO: 2732 - RNA, 58 nt, synthetic construct
  source 1..58: mol_type = other RNA
ctgtgacattcttcgacacgccccccatgctctttgtgttcattgccctgggccggtg

SEQ ID NO: 2733 - RNA, 58 nt, synthetic construct
  source 1..58: mol_type = other RNA
ctgtgacattcttcgacacgccccccatgctctttgtgttcattgccctgggcagatg

SEQ ID NO: 2734 - RNA, 58 nt, synthetic construct
  source 1..58: mol_type = other RNA
ctgtgacattcttcgacacgccccccatgctctttgtgttcattgccctgggaaggtg

SEQ ID NO: 2735 - RNA, 58 nt, synthetic construct
  source 1..58: mol_type = other RNA
ctgtgacattcttcgacacgccccccatgctctttgtgttcattgccctggggcggtg

SEQ ID NO: 2736 - RNA, 58 nt, synthetic construct
  source 1..58: mol_type = other RNA
ctgtgacattcttcgacacgccccccatgctctttgtgttcattgccctggggaggtg

SEQ ID NO: 2737 - RNA, 58 nt, synthetic construct
  source 1..58: mol_type = other RNA
ctgtgacattcttcgacacgccccccatgctctttgtgttcattgccctgggtaggtg

SEQ ID NO: 2738 - RNA, 58 nt, synthetic construct
  source 1..58: mol_type = other RNA
ctgtgacattcttcgacacgccccccatgctctttgtgttcattgccctgggcaggtg

SEQ ID NO: 2739 - RNA, 58 nt, synthetic construct
  source 1..58: mol_type = other RNA
ctgtgacattcttcgacacgccccccatgctctttgtgttcattgccctgggaagatg

SEQ ID NO: 2740 - RNA, 59 nt, synthetic construct
  source 1..59: mol_type = other RNA
cctgtgacattcttcgacacgccccccatgctctttgtgttcattgccctggggcggtg

SEQ ID NO: 2741 - RNA, 59 nt, synthetic construct
  source 1..59: mol_type = other RNA
cctgtgacattcttcgacacgccccccatgctctttgtgttcattgccctggggaggtg

SEQ ID NO: 2742 - RNA, 59 nt, synthetic construct
  source 1..59: mol_type = other RNA
cctgtgacattcttcgacacgccccccatgctctttgtgttcattgccctgggaagatg

SEQ ID NO: 2743 - RNA, 59 nt, synthetic construct
  source 1..59: mol_type = other RNA
cctgtgacattcttcgacacgccccccatgctctttgtgttcattgccctgggacggtg

SEQ ID NO: 2744 - RNA, 59 nt, synthetic construct
  source 1..59: mol_type = other RNA
cctgtgacattcttcgacacgccccccatgctctttgtgttcattgccctgggcagatg

SEQ ID NO: 2745 - RNA, 59 nt, synthetic construct
  source 1..59: mol_type = other RNA
cctgtgacattcttcgacacgccccccatgctctttgtgttcattgccctgggtagatg

SEQ ID NO: 2746 - RNA, 59 nt, synthetic construct
  source 1..59: mol_type = other RNA
cctgtgacattcttcgacacgccccccatgctctttgtgttcattgccctgggaaggtg

SEQ ID NO: 2747 - RNA, 59 nt, synthetic construct
  source 1..59: mol_type = other RNA
cctgtgacattcttcgacacgccccccatgctctttgtgttcattgccctgggccggtg

SEQ ID NO: 2748 - RNA, 59 nt, synthetic construct
  source 1..59: mol_type = other RNA
cctgtgacattcttcgacacgccccccatgctctttgtgttcattgccctgggtaggtg

SEQ ID NO: 2749 - RNA, 59 nt, synthetic construct
  source 1..59: mol_type = other RNA
cctgtgacattcttcgacacgccccccatgctctttgtgttcattgccctgggtcggtg

SEQ ID NO: 2750 - RNA, 59 nt, synthetic construct
  source 1..59: mol_type = other RNA
cctgtgacattcttcgacacgccccccatgctctttgtgttcattgccctgggcaggtg

SEQ ID NO: 2751 - RNA, 59 nt, synthetic construct
  source 1..59: mol_type = other RNA
cctgtgacattcttcgacacgccccccatgctctttgtgttcattgccctggggagatg

SEQ ID NO: 2752 - RNA, 60 nt, synthetic construct
  source 1..60: mol_type = other RNA
ccctgtgacattcttcgacacgccccccatgctctttgtgttcattgccctgggaaggtg

SEQ ID NO: 2753 - RNA, 60 nt, synthetic construct
  source 1..60: mol_type = other RNA
ccctgtgacattcttcgacacgccccccatgctctttgtgttcattgccctgggtagatg

SEQ ID NO: 2754 - RNA, 60 nt, synthetic construct
  source 1..60: mol_type = other RNA
ccctgtgacattcttcgacacgccccccatgctctttgtgttcattgccctggggaggtg

SEQ ID NO: 2755 - RNA, 60 nt, synthetic construct
  source 1..60: mol_type = other RNA
ccctgtgacattcttcgacacgccccccatgctctttgtgttcattgccctgggtaggtg

SEQ ID NO: 2756 - RNA, 60 nt, synthetic construct
  source 1..60: mol_type = other RNA
ccctgtgacattcttcgacacgccccccatgctctttgtgttcattgccctggggagatg

SEQ ID NO: 2757 - RNA, 60 nt, synthetic construct
  source 1..60: mol_type = other RNA
ccctgtgacattcttcgacacgccccccatgctctttgtgttcattgccctgggtcggtg

SEQ ID NO: 2758 - RNA, 60 nt, synthetic construct
  source 1..60: mol_type = other RNA
ccctgtgacattcttcgacacgccccccatgctctttgtgttcattgccctgggccggtg

SEQ ID NO: 2759 - RNA, 60 nt, synthetic construct
  source 1..60: mol_type = other RNA
ccctgtgacattcttcgacacgccccccatgctctttgtgttcattgccctgggaagatg

SEQ ID NO: 2760 - RNA, 60 nt, synthetic construct
  source 1..60: mol_type = other RNA
ccctgtgacattcttcgacacgccccccatgctctttgtgttcattgccctgggacggtg

SEQ ID NO: 2761 - RNA, 60 nt, synthetic construct
  source 1..60: mol_type = other RNA
ccctgtgacattcttcgacacgccccccatgctctttgtgttcattgccctgggcagatg

SEQ ID NO: 2762 - RNA, 60 nt, synthetic construct
  source 1..60: mol_type = other RNA
ccctgtgacattcttcgacacgccccccatgctctttgtgttcattgccctggggcggtg

SEQ ID NO: 2763 - RNA, 60 nt, synthetic construct
  source 1..60: mol_type = other RNA
ccctgtgacattcttcgacacgccccccatgctctttgtgttcattgccctgggcaggtg

SEQ ID NO: 2764 - RNA, 61 nt, synthetic construct
  source 1..61: mol_type = other RNA
gccctgtgacattcttcgacacgccccccatgctctttgtgttcattgccctgggtagatg

SEQ ID NO: 2765 - RNA, 61 nt, synthetic construct
  source 1..61: mol_type = other RNA
gccctgtgacattcttcgacacgccccccatgctctttgtgttcattgccctgggccggtg

SEQ ID NO: 2766 - RNA, 61 nt, synthetic construct
  source 1..61: mol_type = other RNA
gccctgtgacattcttcgacacgccccccatgctctttgtgttcattgccctggggcggtg

SEQ ID NO: 2767 - RNA, 61 nt, synthetic construct
  source 1..61: mol_type = other RNA
gccctgtgacattcttcgacacgccccccatgctctttgtgttcattgccctggggaggtg

SEQ ID NO: 2768 - RNA, 61 nt, synthetic construct
  source 1..61: mol_type = other RNA
gccctgtgacattcttcgacacgccccccatgctctttgtgttcattgccctgggacggtg

SEQ ID NO: 2769 - RNA, 61 nt, synthetic construct
  source 1..61: mol_type = other RNA
gccctgtgacattcttcgacacgccccccatgctctttgtgttcattgccctggggagatg

SEQ ID NO: 2770 - RNA, 61 nt, synthetic construct
  source 1..61: mol_type = other RNA
gccctgtgacattcttcgacacgccccccatgctctttgtgttcattgccctgggcaggtg

SEQ ID NO: 2771 - RNA, 61 nt, synthetic construct
  source 1..61: mol_type = other RNA
gccctgtgacattcttcgacacgccccccatgctctttgtgttcattgccctgggaaggtg

SEQ ID NO: 2772 - RNA, 61 nt, synthetic construct
  source 1..61: mol_type = other RNA
gccctgtgacattcttcgacacgccccccatgctctttgtgttcattgccctgggtcggtg

SEQ ID NO: 2773 - RNA, 61 nt, synthetic construct
  source 1..61: mol_type = other RNA
gccctgtgacattcttcgacacgccccccatgctctttgtgttcattgccctgggaagatg

SEQ ID NO: 2774 - RNA, 61 nt, synthetic construct
  source 1..61: mol_type = other RNA
gccctgtgacattcttcgacacgccccccatgctctttgtgttcattgccctgggcagatg

SEQ ID NO: 2775 - RNA, 61 nt, synthetic construct
  source 1..61: mol_type = other RNA
gccctgtgacattcttcgacacgccccccatgctctttgtgttcattgccctgggtaggtg

SEQ ID NO: 2776 - RNA, 62 nt, synthetic construct
  source 1..62: mol_type = other RNA
agccctgtgacattcttcgacacgccccccatgctctttgtgttcattgccctgggcaggtg

SEQ ID NO: 2777 - RNA, 62 nt, synthetic construct
  source 1..62: mol_type = other RNA
agccctgtgacattcttcgacacgccccccatgctctttgtgttcattgccctgggcagatg

SEQ ID NO: 2778 - RNA, 62 nt, synthetic construct
  source 1..62: mol_type = other RNA
agccctgtgacattcttcgacacgccccccatgctctttgtgttcattgccctggggagatg

SEQ ID NO: 2779 - RNA, 62 nt, synthetic construct
  source 1..62: mol_type = other RNA
agccctgtgacattcttcgacacgccccccatgctctttgtgttcattgccctgggacggtg

SEQ ID NO: 2780 - RNA, 62 nt, synthetic construct
  source 1..62: mol_type = other RNA
agccctgtgacattcttcgacacgccccccatgctctttgtgttcattgccctgggaaggtg

SEQ ID NO: 2781 - RNA, 62 nt, synthetic construct
  source 1..62: mol_type = other RNA
agccctgtgacattcttcgacacgccccccatgctctttgtgttcattgccctggggaggtg

SEQ ID NO: 2782 - RNA, 62 nt, synthetic construct
  source 1..62: mol_type = other RNA
agccctgtgacattcttcgacacgccccccatgctctttgtgttcattgccctgggtaggtg

SEQ ID NO: 2783 - RNA, 62 nt, synthetic construct
  source 1..62: mol_type = other RNA
agccctgtgacattcttcgacacgccccccatgctctttgtgttcattgccctgggtagatg

SEQ ID NO: 2784 - RNA, 62 nt, synthetic construct
  source 1..62: mol_type = other RNA
agccctgtgacattcttcgacacgccccccatgctctttgtgttcattgccctggggcggtg

SEQ ID NO: 2785 - RNA, 62 nt, synthetic construct
  source 1..62: mol_type = other RNA
agccctgtgacattcttcgacacgccccccatgctctttgtgttcattgccctgggccggtg

SEQ ID NO: 2786 - RNA, 62 nt, synthetic construct
  source 1..62: mol_type = other RNA
agccctgtgacattcttcgacacgccccccatgctctttgtgttcattgccctgggaagatg

SEQ ID NO: 2787 - RNA, 62 nt, synthetic construct
  source 1..62: mol_type = other RNA
agccctgtgacattcttcgacacgccccccatgctctttgtgttcattgccctgggtcggtg

SEQ ID NO: 2788 - RNA, 63 nt, synthetic construct
  source 1..63: mol_type = other RNA
gagccctgtgacattcttcgacacgccccccatgctctttgtgttcattgccctgggaagatg

SEQ ID NO: 2789 - RNA, 63 nt, synthetic construct
  source 1..63: mol_type = other RNA
gagccctgtgacattcttcgacacgccccccatgctctttgtgttcattgccctggggcggtg

SEQ ID NO: 2790 - RNA, 63 nt, synthetic construct
  source 1..63: mol_type = other RNA
gagccctgtgacattcttcgacacgccccccatgctctttgtgttcattgccctggggaggtg

SEQ ID NO: 2791 - RNA, 63 nt, synthetic construct
  source 1..63: mol_type = other RNA
gagccctgtgacattcttcgacacgccccccatgctctttgtgttcattgccctgggtcggtg

SEQ ID NO: 2792 - RNA, 63 nt, synthetic construct
  source 1..63: mol_type = other RNA
gagccctgtgacattcttcgacacgccccccatgctctttgtgttcattgccctgggcagatg

SEQ ID NO: 2793 - RNA, 63 nt, synthetic construct
  source 1..63: mol_type = other RNA
gagccctgtgacattcttcgacacgccccccatgctctttgtgttcattgccctgggtaggtg

SEQ ID NO: 2794 - RNA, 63 nt, synthetic construct
  source 1..63: mol_type = other RNA
gagccctgtgacattcttcgacacgccccccatgctctttgtgttcattgccctggggagatg

SEQ ID NO: 2795 - RNA, 63 nt, synthetic construct
  source 1..63: mol_type = other RNA
gagccctgtgacattcttcgacacgccccccatgctctttgtgttcattgccctgggacggtg

SEQ ID NO: 2796 - RNA, 63 nt, synthetic construct
  source 1..63: mol_type = other RNA
gagccctgtgacattcttcgacacgccccccatgctctttgtgttcattgccctgggaaggtg

SEQ ID NO: 2797 - RNA, 63 nt, synthetic construct
  source 1..63: mol_type = other RNA
gagccctgtgacattcttcgacacgccccccatgctctttgtgttcattgccctgggcaggtg

SEQ ID NO: 2798 - RNA, 63 nt, synthetic construct
  source 1..63: mol_type = other RNA
gagccctgtgacattcttcgacacgccccccatgctctttgtgttcattgccctgggccggtg

SEQ ID NO: 2799 - RNA, 63 nt, synthetic construct
  source 1..63: mol_type = other RNA
gagccctgtgacattcttcgacacgccccccatgctctttgtgttcattgccctgggtagatg

SEQ ID NO: 2800 - RNA, 64 nt, synthetic construct
  source 1..64: mol_type = other RNA
ggagccctgtgacattcttcgacacgccccccatgctctttgtgttcattgccctgggtaggtg

SEQ ID NO: 2801 - RNA, 64 nt, synthetic construct
  source 1..64: mol_type = other RNA
ggagccctgtgacattcttcgacacgccccccatgctctttgtgttcattgccctggggcggtg

SEQ ID NO: 2802 - RNA, 64 nt, synthetic construct
  source 1..64: mol_type = other RNA
ggagccctgtgacattcttcgacacgccccccatgctctttgtgttcattgccctggggagatg

SEQ ID NO: 2803 - RNA, 64 nt, synthetic construct
  source 1..64: mol_type = other RNA
ggagccctgtgacattcttcgacacgccccccatgctctttgtgttcattgccctggggaggtg

SEQ ID NO: 2804 - RNA, 64 nt, synthetic construct
  source 1..64: mol_type = other RNA
ggagccctgtgacattcttcgacacgccccccatgctctttgtgttcattgccctgggccggtg

SEQ ID NO: 2805 - RNA, 64 nt, synthetic construct
  source 1..64: mol_type = other RNA
ggagccctgtgacattcttcgacacgccccccatgctctttgtgttcattgccctgggcagatg

SEQ ID NO: 2806 - RNA, 64 nt, synthetic construct
  source 1..64: mol_type = other RNA
ggagccctgtgacattcttcgacacgccccccatgctctttgtgttcattgccctgggcaggtg

SEQ ID NO: 2807 - RNA, 64 nt, synthetic construct
  source 1..64: mol_type = other RNA
ggagccctgtgacattcttcgacacgccccccatgctctttgtgttcattgccctgggaaggtg

SEQ ID NO: 2808 - RNA, 64 nt, synthetic construct
  source 1..64: mol_type = other RNA
ggagccctgtgacattcttcgacacgccccccatgctctttgtgttcattgccctgggtcggtg

SEQ ID NO: 2809 - RNA, 64 nt, synthetic construct
  source 1..64: mol_type = other RNA
ggagccctgtgacattcttcgacacgccccccatgctctttgtgttcattgccctgggtagatg

SEQ ID NO: 2810 - RNA, 64 nt, synthetic construct
  source 1..64: mol_type = other RNA
ggagccctgtgacattcttcgacacgccccccatgctctttgtgttcattgccctgggacggtg

SEQ ID NO: 2811 - RNA, 64 nt, synthetic construct
  source 1..64: mol_type = other RNA
ggagccctgtgacattcttcgacacgccccccatgctctttgtgttcattgccctgggaagatg

SEQ ID NO: 2812 - RNA, 65 nt, synthetic construct
  source 1..65: mol_type = other RNA
aggagccctgtgacattcttcgacacgccccccatgctctttgtgttcattgccctggggagatg

SEQ ID NO: 2813 - RNA, 65 nt, synthetic construct
  source 1..65: mol_type = other RNA
aggagccctgtgacattcttcgacacgccccccatgctctttgtgttcattgccctggggaggtg

SEQ ID NO: 2814 - RNA, 65 nt, synthetic construct
  source 1..65: mol_type = other RNA
aggagccctgtgacattcttcgacacgccccccatgctctttgtgttcattgccctgggccggtg

SEQ ID NO: 2815 - RNA, 65 nt, synthetic construct
  source 1..65: mol_type = other RNA
aggagccctgtgacattcttcgacacgccccccatgctctttgtgttcattgccctgggaaggtg

SEQ ID NO: 2816 - RNA, 65 nt, synthetic construct
  source 1..65: mol_type = other RNA
aggagccctgtgacattcttcgacacgccccccatgctctttgtgttcattgccctgggcaggtg

SEQ ID NO: 2817 - RNA, 65 nt, synthetic construct
  source 1..65: mol_type = other RNA
aggagccctgtgacattcttcgacacgccccccatgctctttgtgttcattgccctggggcggtg

SEQ ID NO: 2818 - RNA, 65 nt, synthetic construct
  source 1..65: mol_type = other RNA
aggagccctgtgacattcttcgacacgccccccatgctctttgtgttcattgccctgggtaggtg

SEQ ID NO: 2819 - RNA, 65 nt, synthetic construct
  source 1..65: mol_type = other RNA
aggagccctgtgacattcttcgacacgccccccatgctctttgtgttcattgccctgggaagatg

SEQ ID NO: 2820 - RNA, 65 nt, synthetic construct
  source 1..65: mol_type = other RNA
aggagccctgtgacattcttcgacacgccccccatgctctttgtgttcattgccctgggtagatg

SEQ ID NO: 2821 - RNA, 65 nt, synthetic construct
  source 1..65: mol_type = other RNA
aggagccctgtgacattcttcgacacgccccccatgctctttgtgttcattgccctgggacggtg

SEQ ID NO: 2822 - RNA, 65 nt, synthetic construct
  source 1..65: mol_type = other RNA
aggagccctgtgacattcttcgacacgccccccatgctctttgtgttcattgccctgggtcggtg

SEQ ID NO: 2823 - RNA, 65 nt, synthetic construct
  source 1..65: mol_type = other RNA
aggagccctgtgacattcttcgacacgccccccatgctctttgtgttcattgccctgggcagatg

SEQ ID NO: 2824 - RNA, 66 nt, synthetic construct
  source 1..66: mol_type = other RNA
gaggagccctgtgacattcttcgacacgccccccatgctctttgtgttcattgccctggggagatg

SEQ ID NO: 2825 - RNA, 66 nt, synthetic construct
  source 1..66: mol_type = other RNA
gaggagccctgtgacattcttcgacacgccccccatgctctttgtgttcattgccctgggccggtg

SEQ ID NO: 2826 - RNA, 66 nt, synthetic construct
  source 1..66: mol_type = other RNA
gaggagccctgtgacattcttcgacacgccccccatgctctttgtgttcattgccctgggaagatg

SEQ ID NO: 2827 - RNA, 66 nt, synthetic construct
  source 1..66: mol_type = other RNA
gaggagccctgtgacattcttcgacacgccccccatgctctttgtgttcattgccctgggtcggtg

SEQ ID NO: 2828 - RNA, 66 nt, synthetic construct
  source 1..66: mol_type = other RNA
gaggagccctgtgacattcttcgacacgccccccatgctctttgtgttcattgccctgggacggtg

SEQ ID NO: 2829 - RNA, 66 nt, synthetic construct
  source 1..66: mol_type = other RNA
gaggagccctgtgacattcttcgacacgccccccatgctctttgtgttcattgccctggggcggtg

SEQ ID NO: 2830 - RNA, 66 nt, synthetic construct
  source 1..66: mol_type = other RNA
gaggagccctgtgacattcttcgacacgccccccatgctctttgtgttcattgccctgggcagatg

SEQ ID NO: 2831 - RNA, 66 nt, synthetic construct
  source 1..66: mol_type = other RNA
gaggagccctgtgacattcttcgacacgccccccatgctctttgtgttcattgccctgggcaggtg

SEQ ID NO: 2832 - RNA, 66 nt, synthetic construct
  source 1..66: mol_type = other RNA
gaggagccctgtgacattcttcgacacgccccccatgctctttgtgttcattgccctgggtaggtg

SEQ ID NO: 2833 - RNA, 66 nt, synthetic construct
  source 1..66: mol_type = other RNA
gaggagccctgtgacattcttcgacacgccccccatgctctttgtgttcattgccctgggaaggtg

SEQ ID NO: 2834 - RNA, 66 nt, synthetic construct
  source 1..66: mol_type = other RNA
gaggagccctgtgacattcttcgacacgccccccatgctctttgtgttcattgccctggggaggtg

SEQ ID NO: 2835 - RNA, 66 nt, synthetic construct
  source 1..66: mol_type = other RNA
gaggagccctgtgacattcttcgacacgccccccatgctctttgtgttcattgccctgggtagatg

SEQ ID NO: 2836 - RNA, 67 nt, synthetic construct
  source 1..67: mol_type = other RNA
agaggagccctgtgacattcttcgacacgccccccatgctctttgtgttcattgccctgggtcggtg

SEQ ID NO: 2837 - RNA, 67 nt, synthetic construct
  source 1..67: mol_type = other RNA
agaggagccctgtgacattcttcgacacgccccccatgctctttgtgttcattgccctgggtagatg

SEQ ID NO: 2838 - RNA, 67 nt, synthetic construct
  source 1..67: mol_type = other RNA
agaggagccctgtgacattcttcgacacgccccccatgctctttgtgttcattgccctggggcggtg

SEQ ID NO: 2839 - RNA, 67 nt, synthetic construct
  source 1..67: mol_type = other RNA
agaggagccctgtgacattcttcgacacgccccccatgctctttgtgttcattgccctgggccggtg

SEQ ID NO: 2840 - RNA, 67 nt, synthetic construct
  source 1..67: mol_type = other RNA
agaggagccctgtgacattcttcgacacgccccccatgctctttgtgttcattgccctggggaggtg

SEQ ID NO: 2841 - RNA, 67 nt, synthetic construct
  source 1..67: mol_type = other RNA
agaggagccctgtgacattcttcgacacgccccccatgctctttgtgttcattgccctgggacggtg

SEQ ID NO: 2842 - RNA, 67 nt, synthetic construct
  source 1..67: mol_type = other RNA
agaggagccctgtgacattcttcgacacgccccccatgctctttgtgttcattgccctgggaaggtg

SEQ ID NO: 2843 - RNA, 67 nt, synthetic construct
  source 1..67: mol_type = other RNA
agaggagccctgtgacattcttcgacacgccccccatgctctttgtgttcattgccctgggaagatg

SEQ ID NO: 2844 - RNA, 67 nt, synthetic construct
  source 1..67: mol_type = other RNA
agaggagccctgtgacattcttcgacacgccccccatgctctttgtgttcattgccctgggcaggtg

SEQ ID NO: 2845 - RNA, 67 nt, synthetic construct
  source 1..67: mol_type = other RNA
agaggagccctgtgacattcttcgacacgccccccatgctctttgtgttcattgccctgggcagatg

SEQ ID NO: 2846 - RNA, 67 nt, synthetic construct
  source 1..67: mol_type = other RNA
agaggagccctgtgacattcttcgacacgccccccatgctctttgtgttcattgccctggggagatg

SEQ ID NO: 2847 - RNA, 67 nt, synthetic construct
  source 1..67: mol_type = other RNA
agaggagccctgtgacattcttcgacacgccccccatgctctttgtgttcattgccctgggtaggtg

SEQ ID NO: 2848 - RNA, 68 nt, synthetic construct
  source 1..68: mol_type = other RNA
gagaggagccctgtgacattcttcgacacgccccccatgctctttgtgttcattgccctgggcagatg

SEQ ID NO: 2849 - RNA, 68 nt, synthetic construct
  source 1..68: mol_type = other RNA
gagaggagccctgtgacattcttcgacacgccccccatgctctttgtgttcattgccctgggtaggtg

SEQ ID NO: 2850 - RNA, 68 nt, synthetic construct
  source 1..68: mol_type = other RNA
gagaggagccctgtgacattcttcgacacgccccccatgctctttgtgttcattgccctgggaaggtg

SEQ ID NO: 2851 - RNA, 68 nt, synthetic construct
  source 1..68: mol_type = other RNA
gagaggagccctgtgacattcttcgacacgccccccatgctctttgtgttcattgccctgggtcggtg

SEQ ID NO: 2852 - RNA, 68 nt, synthetic construct
  source 1..68: mol_type = other RNA
gagaggagccctgtgacattcttcgacacgccccccatgctctttgtgttcattgccctggggcggtg

SEQ ID NO: 2853 - RNA, 68 nt, synthetic construct
  source 1..68: mol_type = other RNA
gagaggagccctgtgacattcttcgacacgccccccatgctctttgtgttcattgccctgggaagatg

SEQ ID NO: 2854 - RNA, 68 nt, synthetic construct
  source 1..68: mol_type = other RNA
gagaggagccctgtgacattcttcgacacgccccccatgctctttgtgttcattgccctgggacggtg

SEQ ID NO: 2855 - RNA, 68 nt, synthetic construct
  source 1..68: mol_type = other RNA
gagaggagccctgtgacattcttcgacacgccccccatgctctttgtgttcattgccctgggtagatg

SEQ ID NO: 2856 - RNA, 68 nt, synthetic construct
  source 1..68: mol_type = other RNA
gagaggagccctgtgacattcttcgacacgccccccatgctctttgtgttcattgccctggggagatg

SEQ ID NO: 2857 - RNA, 68 nt, synthetic construct
  source 1..68: mol_type = other RNA
gagaggagccctgtgacattcttcgacacgccccccatgctctttgtgttcattgccctggggaggtg

SEQ ID NO: 2858 - RNA, 68 nt, synthetic construct
  source 1..68: mol_type = other RNA
gagaggagccctgtgacattcttcgacacgccccccatgctctttgtgttcattgccctgggccggtg

SEQ ID NO: 2859 - RNA, 68 nt, synthetic construct
  source 1..68: mol_type = other RNA
gagaggagccctgtgacattcttcgacacgccccccatgctctttgtgttcattgccctgggcaggtg

SEQ ID NO: 2860 - RNA, 69 nt, synthetic construct
  source 1..69: mol_type = other RNA
ggagaggagccctgtgacattcttcgacacgccccccatgctctttgtgttcattgccctgggtcggtg

SEQ ID NO: 2861 - RNA, 69 nt, synthetic construct
  source 1..69: mol_type = other RNA
ggagaggagccctgtgacattcttcgacacgccccccatgctctttgtgttcattgccctgggaagatg

SEQ ID NO: 2862 - RNA, 69 nt, synthetic construct
  source 1..69: mol_type = other RNA
ggagaggagccctgtgacattcttcgacacgccccccatgctctttgtgttcattgccctgggtagatg

SEQ ID NO: 2863 - RNA, 69 nt, synthetic construct
  source 1..69: mol_type = other RNA
ggagaggagccctgtgacattcttcgacacgccccccatgctctttgtgttcattgccctgggtaggtg

SEQ ID NO: 2864 - RNA, 69 nt, synthetic construct
  source 1..69: mol_type = other RNA
ggagaggagccctgtgacattcttcgacacgccccccatgctctttgtgttcattgccctggggcggtg

SEQ ID NO: 2865 - RNA, 69 nt, synthetic construct
  source 1..69: mol_type = other RNA
ggagaggagccctgtgacattcttcgacacgccccccatgctctttgtgttcattgccctgggccggtg

SEQ ID NO: 2866 - RNA, 69 nt, synthetic construct
  source 1..69: mol_type = other RNA
ggagaggagccctgtgacattcttcgacacgccccccatgctctttgtgttcattgccctgggcagatg

SEQ ID NO: 2867 - RNA, 69 nt, synthetic construct
  source 1..69: mol_type = other RNA
ggagaggagccctgtgacattcttcgacacgccccccatgctctttgtgttcattgccctgggaaggtg

SEQ ID NO: 2868 - RNA, 69 nt, synthetic construct
  source 1..69: mol_type = other RNA
ggagaggagccctgtgacattcttcgacacgccccccatgctctttgtgttcattgccctggggagatg

SEQ ID NO: 2869 - RNA, 69 nt, synthetic construct
  source 1..69: mol_type = other RNA
ggagaggagccctgtgacattcttcgacacgccccccatgctctttgtgttcattgccctggggaggtg

SEQ ID NO: 2870 - RNA, 69 nt, synthetic construct
  source 1..69: mol_type = other RNA
ggagaggagccctgtgacattcttcgacacgccccccatgctctttgtgttcattgccctgggcaggtg

SEQ ID NO: 2871 - RNA, 69 nt, synthetic construct
  source 1..69: mol_type = other RNA
ggagaggagccctgtgacattcttcgacacgccccccatgctctttgtgttcattgccctgggacggtg

SEQ ID NO: 2872 - RNA, 70 nt, synthetic construct
  source 1..70: mol_type = other RNA
cggagaggagccctgtgacattcttcgacacgccccccatgctctttgtgttcattgccctgggcaggtg

SEQ ID NO: 2873 - RNA, 70 nt, synthetic construct
  source 1..70: mol_type = other RNA
cggagaggagccctgtgacattcttcgacacgccccccatgctctttgtgttcattgccctgggaaggtg

SEQ ID NO: 2874 - RNA, 70 nt, synthetic construct
  source 1..70: mol_type = other RNA
cggagaggagccctgtgacattcttcgacacgccccccatgctctttgtgttcattgccctgggacggtg

SEQ ID NO: 2875 - RNA, 70 nt, synthetic construct
  source 1..70: mol_type = other RNA
cggagaggagccctgtgacattcttcgacacgccccccatgctctttgtgttcattgccctgggccggtg

SEQ ID NO: 2876 - RNA, 70 nt, synthetic construct
  source 1..70: mol_type = other RNA
cggagaggagccctgtgacattcttcgacacgccccccatgctctttgtgttcattgccctggggagatg

SEQ ID NO: 2877 - RNA, 70 nt, synthetic construct
  source 1..70: mol_type = other RNA
cggagaggagccctgtgacattcttcgacacgccccccatgctctttgtgttcattgccctgggtaggtg

SEQ ID NO: 2878 - RNA, 70 nt, synthetic construct
  source 1..70: mol_type = other RNA
cggagaggagccctgtgacattcttcgacacgccccccatgctctttgtgttcattgccctgggtcggtg

SEQ ID NO: 2879 - RNA, 70 nt, synthetic construct
  source 1..70: mol_type = other RNA
cggagaggagccctgtgacattcttcgacacgccccccatgctctttgtgttcattgccctggggcggtg

SEQ ID NO: 2880 - RNA, 70 nt, synthetic construct
  source 1..70: mol_type = other RNA
cggagaggagccctgtgacattcttcgacacgccccccatgctctttgtgttcattgccctgggtagatg

SEQ ID NO: 2881 - RNA, 70 nt, synthetic construct
  source 1..70: mol_type = other RNA
cggagaggagccctgtgacattcttcgacacgccccccatgctctttgtgttcattgccctgggcagatg

SEQ ID NO: 2882 - RNA, 70 nt, synthetic construct
  source 1..70: mol_type = other RNA
cggagaggagccctgtgacattcttcgacacgccccccatgctctttgtgttcattgccctgggaagatg

SEQ ID NO: 2883 - RNA, 70 nt, synthetic construct
  source 1..70: mol_type = other RNA
cggagaggagccctgtgacattcttcgacacgccccccatgctctttgtgttcattgccctggggaggtg

SEQ ID NO: 2884 - RNA, 71 nt, synthetic construct
  source 1..71: mol_type = other RNA
gcggagaggagccctgtgacattcttcgacacgccccccatgctctttgtgttcattgccctgggaagatg

SEQ ID NO: 2885 - RNA, 71 nt, synthetic construct
  source 1..71: mol_type = other RNA
gcggagaggagccctgtgacattcttcgacacgccccccatgctctttgtgttcattgccctggggaggtg

SEQ ID NO: 2886 - RNA, 71 nt, synthetic construct
  source 1..71: mol_type = other RNA
gcggagaggagccctgtgacattcttcgacacgccccccatgctctttgtgttcattgccctgggtagatg

SEQ ID NO: 2887 - RNA, 71 nt, synthetic construct
  source 1..71: mol_type = other RNA
gcggagaggagccctgtgacattcttcgacacgccccccatgctctttgtgttcattgccctgggccggtg

SEQ ID NO: 2888 - RNA, 71 nt, synthetic construct
  source 1..71: mol_type = other RNA
gcggagaggagccctgtgacattcttcgacacgccccccatgctctttgtgttcattgccctgggacggtg

SEQ ID NO: 2889 - RNA, 71 nt, synthetic construct
  source 1..71: mol_type = other RNA
gcggagaggagccctgtgacattcttcgacacgccccccatgctctttgtgttcattgccctgggcagatg

SEQ ID NO: 2890 - RNA, 71 nt, synthetic construct
  source 1..71: mol_type = other RNA
gcggagaggagccctgtgacattcttcgacacgccccccatgctctttgtgttcattgccctgggtaggtg

SEQ ID NO: 2891 - RNA, 71 nt, synthetic construct
  source 1..71: mol_type = other RNA
gcggagaggagccctgtgacattcttcgacacgccccccatgctctttgtgttcattgccctgggcaggtg

SEQ ID NO: 2892 - RNA, 71 nt, synthetic construct
  source 1..71: mol_type = other RNA
gcggagaggagccctgtgacattcttcgacacgccccccatgctctttgtgttcattgccctgggaaggtg

SEQ ID NO: 2893 - RNA, 71 nt, synthetic construct
  source 1..71: mol_type = other RNA
gcggagaggagccctgtgacattcttcgacacgccccccatgctctttgtgttcattgccctggggagatg

SEQ ID NO: 2894 - RNA, 71 nt, synthetic construct
  source 1..71: mol_type = other RNA
gcggagaggagccctgtgacattcttcgacacgccccccatgctctttgtgttcattgccctggggcggtg

SEQ ID NO: 2895 - RNA, 71 nt, synthetic construct
  source 1..71: mol_type = other RNA
gcggagaggagccctgtgacattcttcgacacgccccccatgctctttgtgttcattgccctgggtcggtg

SEQ ID NO: 2896 - RNA, 72 nt, synthetic construct
  source 1..72: mol_type = other RNA
ggcggagaggagccctgtgacattcttcgacacgccccccatgctctttgtgttcattgccctgggtagatg

SEQ ID NO: 2897 - RNA, 72 nt, synthetic construct
  source 1..72: mol_type = other RNA
ggcggagaggagccctgtgacattcttcgacacgccccccatgctctttgtgttcattgccctgggacggtg

SEQ ID NO: 2898 - RNA, 72 nt, synthetic construct
  source 1..72: mol_type = other RNA
ggcggagaggagccctgtgacattcttcgacacgccccccatgctctttgtgttcattgccctgggtcggtg

SEQ ID NO: 2899 - RNA, 72 nt, synthetic construct
  source 1..72: mol_type = other RNA
ggcggagaggagccctgtgacattcttcgacacgccccccatgctctttgtgttcattgccctggggagatg

SEQ ID NO: 2900 - RNA, 72 nt, synthetic construct
  source 1..72: mol_type = other RNA
ggcggagaggagccctgtgacattcttcgacacgccccccatgctctttgtgttcattgccctggggaggtg

SEQ ID NO: 2901 - RNA, 72 nt, synthetic construct
  source 1..72: mol_type = other RNA
ggcggagaggagccctgtgacattcttcgacacgccccccatgctctttgtgttcattgccctgggcagatg

SEQ ID NO: 2902 - RNA, 72 nt, synthetic construct
  source 1..72: mol_type = other RNA
ggcggagaggagccctgtgacattcttcgacacgccccccatgctctttgtgttcattgccctggggcggtg

SEQ ID NO: 2903 - RNA, 72 nt, synthetic construct
  source 1..72: mol_type = other RNA
ggcggagaggagccctgtgacattcttcgacacgccccccatgctctttgtgttcattgccctgggcaggtg

SEQ ID NO: 2904 - RNA, 72 nt, synthetic construct
  source 1..72: mol_type = other RNA
ggcggagaggagccctgtgacattcttcgacacgccccccatgctctttgtgttcattgccctgggaagatg

SEQ ID NO: 2905 - RNA, 72 nt, synthetic construct
  source 1..72: mol_type = other RNA
ggcggagaggagccctgtgacattcttcgacacgccccccatgctctttgtgttcattgccctgggaaggtg

SEQ ID NO: 2906 - RNA, 72 nt, synthetic construct
  source 1..72: mol_type = other RNA
ggcggagaggagccctgtgacattcttcgacacgccccccatgctctttgtgttcattgccctgggccggtg

SEQ ID NO: 2907 - RNA, 72 nt, synthetic construct
  source 1..72: mol_type = other RNA
ggcggagaggagccctgtgacattcttcgacacgccccccatgctctttgtgttcattgccctgggtaggtg

SEQ ID NO: 2908 - RNA, 73 nt, synthetic construct
  source 1..73: mol_type = other RNA
aggcggagaggagccctgtgacattcttcgacacgccccccatgctctttgtgttcattgccctggggagatg

SEQ ID NO: 2909 - RNA, 73 nt, synthetic construct
  source 1..73: mol_type = other RNA
aggcggagaggagccctgtgacattcttcgacacgccccccatgctctttgtgttcattgccctggggcggtg

SEQ ID NO: 2910 - RNA, 73 nt, synthetic construct
  source 1..73: mol_type = other RNA
aggcggagaggagccctgtgacattcttcgacacgccccccatgctctttgtgttcattgccctgggacggtg

SEQ ID NO: 2911 - RNA, 73 nt, synthetic construct
  source 1..73: mol_type = other RNA
aggcggagaggagccctgtgacattcttcgacacgccccccatgctctttgtgttcattgccctgggcaggtg

SEQ ID NO: 2912 - RNA, 73 nt, synthetic construct
  source 1..73: mol_type = other RNA
aggcggagaggagccctgtgacattcttcgacacgccccccatgctctttgtgttcattgccctgggaagatg

SEQ ID NO: 2913 - RNA, 73 nt, synthetic construct
  source 1..73: mol_type = other RNA
aggcggagaggagccctgtgacattcttcgacacgccccccatgctctttgtgttcattgccctgggccggtg

SEQ ID NO: 2914 - RNA, 73 nt, synthetic construct
  source 1..73: mol_type = other RNA
aggcggagaggagccctgtgacattcttcgacacgccccccatgctctttgtgttcattgccctgggaaggtg

SEQ ID NO: 2915 - RNA, 73 nt, synthetic construct
  source 1..73: mol_type = other RNA
aggcggagaggagccctgtgacattcttcgacacgccccccatgctctttgtgttcattgccctgggcagatg

SEQ ID NO: 2916 - RNA, 73 nt, synthetic construct
  source 1..73: mol_type = other RNA
aggcggagaggagccctgtgacattcttcgacacgccccccatgctctttgtgttcattgccctgggtagatg

SEQ ID NO: 2917 - RNA, 73 nt, synthetic construct
  source 1..73: mol_type = other RNA
aggcggagaggagccctgtgacattcttcgacacgccccccatgctctttgtgttcattgccctgggtcggtg

SEQ ID NO: 2918 - RNA, 73 nt, synthetic construct
  source 1..73: mol_type = other RNA
aggcggagaggagccctgtgacattcttcgacacgccccccatgctctttgtgttcattgccctggggaggtg

SEQ ID NO: 2919 - RNA, 73 nt, synthetic construct
  source 1..73: mol_type = other RNA
aggcggagaggagccctgtgacattcttcgacacgccccccatgctctttgtgttcattgccctgggtaggtg

SEQ ID NO: 2920 - RNA, 74 nt, synthetic construct
  source 1..74: mol_type = other RNA
aaggcggagaggagccctgtgacattcttcgacacgccccccatgctctttgtgttcattgccctgggcagatg

SEQ ID NO: 2921 - RNA, 74 nt, synthetic construct
  source 1..74: mol_type = other RNA
aaggcggagaggagccctgtgacattcttcgacacgccccccatgctctttgtgttcattgccctggggaggtg

SEQ ID NO: 2922 - RNA, 74 nt, synthetic construct
  source 1..74: mol_type = other RNA
aaggcggagaggagccctgtgacattcttcgacacgccccccatgctctttgtgttcattgccctgggtcggtg

SEQ ID NO: 2923 - RNA, 74 nt, synthetic construct
  source 1..74: mol_type = other RNA
aaggcggagaggagccctgtgacattcttcgacacgccccccatgctctttgtgttcattgccctgggacggtg

SEQ ID NO: 2924 - RNA, 74 nt, synthetic construct
  source 1..74: mol_type = other RNA
aaggcggagaggagccctgtgacattcttcgacacgccccccatgctctttgtgttcattgccctgggaaggtg

SEQ ID NO: 2925 - RNA, 74 nt, synthetic construct
  source 1..74: mol_type = other RNA
aaggcggagaggagccctgtgacattcttcgacacgccccccatgctctttgtgttcattgccctgggaagatg

SEQ ID NO: 2926 - RNA, 74 nt, synthetic construct
  source 1..74: mol_type = other RNA
aaggcggagaggagccctgtgacattcttcgacacgccccccatgctctttgtgttcattgccctggggagatg

SEQ ID NO: 2927 - RNA, 74 nt, synthetic construct
  source 1..74: mol_type = other RNA
aaggcggagaggagccctgtgacattcttcgacacgccccccatgctctttgtgttcattgccctgggccggtg

SEQ ID NO: 2928 - RNA, 74 nt, synthetic construct
  source 1..74: mol_type = other RNA
aaggcggagaggagccctgtgacattcttcgacacgccccccatgctctttgtgttcattgccctgggcaggtg

SEQ ID NO: 2929 - RNA, 74 nt, synthetic construct
  source 1..74: mol_type = other RNA
aaggcggagaggagccctgtgacattcttcgacacgccccccatgctctttgtgttcattgccctgggtaggtg

SEQ ID NO: 2930 - RNA, 74 nt, synthetic construct
  source 1..74: mol_type = other RNA
aaggcggagaggagccctgtgacattcttcgacacgccccccatgctctttgtgttcattgccctgggtagatg

SEQ ID NO: 2931 - RNA, 74 nt, synthetic construct
  source 1..74: mol_type = other RNA
aaggcggagaggagccctgtgacattcttcgacacgccccccatgctctttgtgttcattgccctggggcggtg

SEQ ID NO: 2932 - RNA, 75 nt, synthetic construct
  source 1..75: mol_type = other RNA
gaaggcggagaggagccctgtgacattcttcgacacgccccccatgctctttgtgttcattgccctggggaggtg

SEQ ID NO: 2933 - RNA, 75 nt, synthetic construct
  source 1..75: mol_type = other RNA
gaaggcggagaggagccctgtgacattcttcgacacgccccccatgctctttgtgttcattgccctgggtagatg

SEQ ID NO: 2934 - RNA, 75 nt, synthetic construct
  source 1..75: mol_type = other RNA
gaaggcggagaggagccctgtgacattcttcgacacgccccccatgctctttgtgttcattgccctgggtcggtg

SEQ ID NO: 2935 - RNA, 75 nt, synthetic construct
  source 1..75: mol_type = other RNA
gaaggcggagaggagccctgtgacattcttcgacacgccccccatgctctttgtgttcattgccctgggtaggtg

SEQ ID NO: 2936 - RNA, 75 nt, synthetic construct
  source 1..75: mol_type = other RNA
gaaggcggagaggagccctgtgacattcttcgacacgccccccatgctctttgtgttcattgccctgggcagatg

SEQ ID NO: 2937 - RNA, 75 nt, synthetic construct
  source 1..75: mol_type = other RNA
gaaggcggagaggagccctgtgacattcttcgacacgccccccatgctctttgtgttcattgccctggggcggtg

SEQ ID NO: 2938 - RNA, 75 nt, synthetic construct
  source 1..75: mol_type = other RNA
gaaggcggagaggagccctgtgacattcttcgacacgccccccatgctctttgtgttcattgccctgggcaggtg

SEQ ID NO: 2939 - RNA, 75 nt, synthetic construct
  source 1..75: mol_type = other RNA
gaaggcggagaggagccctgtgacattcttcgacacgccccccatgctctttgtgttcattgccctgggacggtg

SEQ ID NO: 2940 - RNA, 75 nt, synthetic construct
  source 1..75: mol_type = other RNA
gaaggcggagaggagccctgtgacattcttcgacacgccccccatgctctttgtgttcattgccctggggagatg

SEQ ID NO: 2941 - RNA, 75 nt, synthetic construct
  source 1..75: mol_type = other RNA
gaaggcggagaggagccctgtgacattcttcgacacgccccccatgctctttgtgttcattgccctgggccggtg

SEQ ID NO: 2942 - RNA, 75 nt, synthetic construct
  source 1..75: mol_type = other RNA
gaaggcggagaggagccctgtgacattcttcgacacgccccccatgctctttgtgttcattgccctgggaaggtg

SEQ ID NO: 2943 - RNA, 75 nt, synthetic construct
  source 1..75: mol_type = other RNA
gaaggcggagaggagccctgtgacattcttcgacacgccccccatgctctttgtgttcattgccctgggaagatg

SEQ ID NO: 2944 - RNA, 76 nt, synthetic construct
  source 1..76: mol_type = other RNA
agaaggcggagaggagccctgtgacattcttcgacacgccccccatgctctttgtgttcattgccctgggccggtg

SEQ ID NO: 2945 - RNA, 76 nt, synthetic construct
  source 1..76: mol_type = other RNA
agaaggcggagaggagccctgtgacattcttcgacacgccccccatgctctttgtgttcattgccctgggtcggtg

SEQ ID NO: 2946 - RNA, 76 nt, synthetic construct
  source 1..76: mol_type = other RNA
agaaggcggagaggagccctgtgacattcttcgacacgccccccatgctctttgtgttcattgccctgggtagatg

SEQ ID NO: 2947 - RNA, 76 nt, synthetic construct
  source 1..76: mol_type = other RNA
agaaggcggagaggagccctgtgacattcttcgacacgccccccatgctctttgtgttcattgccctgggcagatg

SEQ ID NO: 2948 - RNA, 76 nt, synthetic construct
  source 1..76: mol_type = other RNA
agaaggcggagaggagccctgtgacattcttcgacacgccccccatgctctttgtgttcattgccctgggtaggtg

SEQ ID NO: 2949 - RNA, 76 nt, synthetic construct
  source 1..76: mol_type = other RNA
agaaggcggagaggagccctgtgacattcttcgacacgccccccatgctctttgtgttcattgccctggggcggtg

SEQ ID NO: 2950 - RNA, 76 nt, synthetic construct
  source 1..76: mol_type = other RNA
agaaggcggagaggagccctgtgacattcttcgacacgccccccatgctctttgtgttcattgccctgggaaggtg

SEQ ID NO: 2951 - RNA, 76 nt, synthetic construct
  source 1..76: mol_type = other RNA
agaaggcggagaggagccctgtgacattcttcgacacgccccccatgctctttgtgttcattgccctgggcaggtg

SEQ ID NO: 2952 - RNA, 76 nt, synthetic construct
  source 1..76: mol_type = other RNA
agaaggcggagaggagccctgtgacattcttcgacacgccccccatgctctttgtgttcattgccctggggaggtg

SEQ ID NO: 2953 - RNA, 76 nt, synthetic construct
  source 1..76: mol_type = other RNA
agaaggcggagaggagccctgtgacattcttcgacacgccccccatgctctttgtgttcattgccctgggaagatg

SEQ ID NO: 2954 - RNA, 76 nt, synthetic construct
  source 1..76: mol_type = other RNA
agaaggcggagaggagccctgtgacattcttcgacacgccccccatgctctttgtgttcattgccctgggacggtg

SEQ ID NO: 2955 - RNA, 76 nt, synthetic construct
  source 1..76: mol_type = other RNA
agaaggcggagaggagccctgtgacattcttcgacacgccccccatgctctttgtgttcattgccctggggagatg

SEQ ID NO: 2956 - RNA, 77 nt, synthetic construct
  source 1..77: mol_type = other RNA
gagaaggcggagaggagccctgtgacattcttcgacacgccccccatgctctttgtgttcattgccctgggccggtg

SEQ ID NO: 2957 - RNA, 77 nt, synthetic construct
  source 1..77: mol_type = other RNA
gagaaggcggagaggagccctgtgacattcttcgacacgccccccatgctctttgtgttcattgccctgggtagatg

SEQ ID NO: 2958 - RNA, 77 nt, synthetic construct
  source 1..77: mol_type = other RNA
gagaaggcggagaggagccctgtgacattcttcgacacgccccccatgctctttgtgttcattgccctgggtaggtg

SEQ ID NO: 2959 - RNA, 77 nt, synthetic construct
  source 1..77: mol_type = other RNA
gagaaggcggagaggagccctgtgacattcttcgacacgccccccatgctctttgtgttcattgccctggggagatg

SEQ ID NO: 2960 - RNA, 77 nt, synthetic construct
  source 1..77: mol_type = other RNA
gagaaggcggagaggagccctgtgacattcttcgacacgccccccatgctctttgtgttcattgccctgggtcggtg

SEQ ID NO: 2961 - RNA, 77 nt, synthetic construct
  source 1..77: mol_type = other RNA
gagaaggcggagaggagccctgtgacattcttcgacacgccccccatgctctttgtgttcattgccctgggcaggtg

SEQ ID NO: 2962 - RNA, 77 nt, synthetic construct
  source 1..77: mol_type = other RNA
gagaaggcggagaggagccctgtgacattcttcgacacgccccccatgctctttgtgttcattgccctgggaaggtg

SEQ ID NO: 2963 - RNA, 77 nt, synthetic construct
  source 1..77: mol_type = other RNA
gagaaggcggagaggagccctgtgacattcttcgacacgccccccatgctctttgtgttcattgccctggggaggtg

SEQ ID NO: 2964 - RNA, 77 nt, synthetic construct
  source 1..77: mol_type = other RNA
gagaaggcggagaggagccctgtgacattcttcgacacgccccccatgctctttgtgttcattgccctggggcggtg

SEQ ID NO: 2965 - RNA, 77 nt, synthetic construct
  source 1..77: mol_type = other RNA
gagaaggcggagaggagccctgtgacattcttcgacacgccccccatgctctttgtgttcattgccctgggaagatg

SEQ ID NO: 2966 - RNA, 77 nt, synthetic construct
  source 1..77: mol_type = other RNA
gagaaggcggagaggagccctgtgacattcttcgacacgccccccatgctctttgtgttcattgccctgggcagatg

SEQ ID NO: 2967 - RNA, 77 nt, synthetic construct
  source 1..77: mol_type = other RNA
gagaaggcggagaggagccctgtgacattcttcgacacgccccccatgctctttgtgttcattgccctgggacggtg

SEQ ID NO: 2968 - RNA, 78 nt, synthetic construct
  source 1..78: mol_type = other RNA
tgagaaggcggagaggagccctgtgacattcttcgacacgccccccatgctctttgtgttcattgccctgggccggtg

SEQ ID NO: 2969 - RNA, 78 nt, synthetic construct
  source 1..78: mol_type = other RNA
tgagaaggcggagaggagccctgtgacattcttcgacacgccccccatgctctttgtgttcattgccctgggaaggtg

SEQ ID NO: 2970 - RNA, 78 nt, synthetic construct
  source 1..78: mol_type = other RNA
tgagaaggcggagaggagccctgtgacattcttcgacacgccccccatgctctttgtgttcattgccctgggtagatg

SEQ ID NO: 2971 - RNA, 78 nt, synthetic construct
  source 1..78: mol_type = other RNA
tgagaaggcggagaggagccctgtgacattcttcgacacgccccccatgctctttgtgttcattgccctgggtcggtg

SEQ ID NO: 2972 - RNA, 78 nt, synthetic construct
  source 1..78: mol_type = other RNA
tgagaaggcggagaggagccctgtgacattcttcgacacgccccccatgctctttgtgttcattgccctgggcaggtg

SEQ ID NO: 2973 - RNA, 78 nt, synthetic construct
  source 1..78: mol_type = other RNA
tgagaaggcggagaggagccctgtgacattcttcgacacgccccccatgctctttgtgttcattgccctgggacggtg

SEQ ID NO: 2974 - RNA, 78 nt, synthetic construct
  source 1..78: mol_type = other RNA
tgagaaggcggagaggagccctgtgacattcttcgacacgccccccatgctctttgtgttcattgccctgggtaggtg

SEQ ID NO: 2975 - RNA, 78 nt, synthetic construct
  source 1..78: mol_type = other RNA
tgagaaggcggagaggagccctgtgacattcttcgacacgccccccatgctctttgtgttcattgccctggggagatg

SEQ ID NO: 2976 - RNA, 78 nt, synthetic construct
  source 1..78: mol_type = other RNA
tgagaaggcggagaggagccctgtgacattcttcgacacgccccccatgctctttgtgttcattgccctgggaagatg

SEQ ID NO: 2977 - RNA, 78 nt, synthetic construct
  source 1..78: mol_type = other RNA
tgagaaggcggagaggagccctgtgacattcttcgacacgccccccatgctctttgtgttcattgccctggggcggtg

SEQ ID NO: 2978 - RNA, 78 nt, synthetic construct
  source 1..78: mol_type = other RNA
tgagaaggcggagaggagccctgtgacattcttcgacacgccccccatgctctttgtgttcattgccctgggcagatg

SEQ ID NO: 2979 - RNA, 78 nt, synthetic construct
  source 1..78: mol_type = other RNA
tgagaaggcggagaggagccctgtgacattcttcgacacgccccccatgctctttgtgttcattgccctggggaggtg

SEQ ID NO: 2980 - RNA, 79 nt, synthetic construct
  source 1..79: mol_type = other RNA
ctgagaaggcggagaggagccctgtgacattcttcgacacgccccccatgctctttgtgttcattgccctgggaaggtg

SEQ ID NO: 2981 - RNA, 79 nt, synthetic construct
  source 1..79: mol_type = other RNA
ctgagaaggcggagaggagccctgtgacattcttcgacacgccccccatgctctttgtgttcattgccctggggaggtg

SEQ ID NO: 2982 - RNA, 79 nt, synthetic construct
  source 1..79: mol_type = other RNA
ctgagaaggcggagaggagccctgtgacattcttcgacacgccccccatgctctttgtgttcattgccctgggccggtg

SEQ ID NO: 2983 - RNA, 79 nt, synthetic construct
  source 1..79: mol_type = other RNA
ctgagaaggcggagaggagccctgtgacattcttcgacacgccccccatgctctttgtgttcattgccctgggaagatg

SEQ ID NO: 2984 - RNA, 79 nt, synthetic construct
  source 1..79: mol_type = other RNA
ctgagaaggcggagaggagccctgtgacattcttcgacacgccccccatgctctttgtgttcattgccctgggacggtg

SEQ ID NO: 2985 - RNA, 79 nt, synthetic construct
  source 1..79: mol_type = other RNA
ctgagaaggcggagaggagccctgtgacattcttcgacacgccccccatgctctttgtgttcattgccctgggcaggtg

SEQ ID NO: 2986 - RNA, 79 nt, synthetic construct
  source 1..79: mol_type = other RNA
ctgagaaggcggagaggagccctgtgacattcttcgacacgccccccatgctctttgtgttcattgccctgggtaggtg

SEQ ID NO: 2987 - RNA, 79 nt, synthetic construct
  source 1..79: mol_type = other RNA
ctgagaaggcggagaggagccctgtgacattcttcgacacgccccccatgctctttgtgttcattgccctgggtagatg

SEQ ID NO: 2988 - RNA, 79 nt, synthetic construct
  source 1..79: mol_type = other RNA
ctgagaaggcggagaggagccctgtgacattcttcgacacgccccccatgctctttgtgttcattgccctggggcggtg

SEQ ID NO: 2989 - RNA, 79 nt, synthetic construct
  source 1..79: mol_type = other RNA
ctgagaaggcggagaggagccctgtgacattcttcgacacgccccccatgctctttgtgttcattgccctggggagatg

SEQ ID NO: 2990 - RNA, 79 nt, synthetic construct
  source 1..79: mol_type = other RNA
ctgagaaggcggagaggagccctgtgacattcttcgacacgccccccatgctctttgtgttcattgccctgggcagatg

SEQ ID NO: 2991 - RNA, 79 nt, synthetic construct
  source 1..79: mol_type = other RNA
ctgagaaggcggagaggagccctgtgacattcttcgacacgccccccatgctctttgtgttcattgccctgggtcggtg

SEQ ID NO: 2992 - RNA, 80 nt, synthetic construct
  source 1..80: mol_type = other RNA
gctgagaaggcggagaggagccctgtgacattcttcgacacgccccccatgctctttgtgttcattgccctggggagatg

SEQ ID NO: 2993 - RNA, 80 nt, synthetic construct
  source 1..80: mol_type = other RNA
gctgagaaggcggagaggagccctgtgacattcttcgacacgccccccatgctctttgtgttcattgccctgggaaggtg

SEQ ID NO: 2994 - RNA, 80 nt, synthetic construct
  source 1..80: mol_type = other RNA
gctgagaaggcggagaggagccctgtgacattcttcgacacgccccccatgctctttgtgttcattgccctgggaagatg

SEQ ID NO: 2995 - RNA, 80 nt, synthetic construct
  source 1..80: mol_type = other RNA
gctgagaaggcggagaggagccctgtgacattcttcgacacgccccccatgctctttgtgttcattgccctgggcaggtg

SEQ ID NO: 2996 - RNA, 80 nt, synthetic construct
  source 1..80: mol_type = other RNA
gctgagaaggcggagaggagccctgtgacattcttcgacacgccccccatgctctttgtgttcattgccctgggccggtg

SEQ ID NO: 2997 - RNA, 80 nt, synthetic construct
  source 1..80: mol_type = other RNA
gctgagaaggcggagaggagccctgtgacattcttcgacacgccccccatgctctttgtgttcattgccctgggacggtg

SEQ ID NO: 2998 - RNA, 80 nt, synthetic construct
  source 1..80: mol_type = other RNA
gctgagaaggcggagaggagccctgtgacattcttcgacacgccccccatgctctttgtgttcattgccctgggtagatg

SEQ ID NO: 2999 - RNA, 80 nt, synthetic construct
  source 1..80: mol_type = other RNA
gctgagaaggcggagaggagccctgtgacattcttcgacacgccccccatgctctttgtgttcattgccctggggcggtg

SEQ ID NO: 3000 - RNA, 80 nt, synthetic construct
  source 1..80: mol_type = other RNA
gctgagaaggcggagaggagccctgtgacattcttcgacacgccccccatgctctttgtgttcattgccctgggcagatg

SEQ ID NO: 3001 - RNA, 80 nt, synthetic construct
  source 1..80: mol_type = other RNA
gctgagaaggcggagaggagccctgtgacattcttcgacacgccccccatgctctttgtgttcattgccctgggtaggtg

SEQ ID NO: 3002 - RNA, 80 nt, synthetic construct
  source 1..80: mol_type = other RNA
gctgagaaggcggagaggagccctgtgacattcttcgacacgccccccatgctctttgtgttcattgccctggggaggtg

SEQ ID NO: 3003 - RNA, 80 nt, synthetic construct
  source 1..80: mol_type = other RNA
gctgagaaggcggagaggagccctgtgacattcttcgacacgccccccatgctctttgtgttcattgccctgggtcggtg

SEQ ID NO: 3004 - RNA, 81 nt, synthetic construct
  source 1..81: mol_type = other RNA
ggctgagaaggcggagaggagccctgtgacattcttcgacacgccccccatgctctttgtgttcattgccctgggaagatg

SEQ ID NO: 3005 - RNA, 81 nt, synthetic construct
  source 1..81: mol_type = other RNA
ggctgagaaggcggagaggagccctgtgacattcttcgacacgccccccatgctctttgtgttcattgccctgggaaggtg

SEQ ID NO: 3006 - RNA, 81 nt, synthetic construct
  source 1..81: mol_type = other RNA
ggctgagaaggcggagaggagccctgtgacattcttcgacacgccccccatgctctttgtgttcattgccctgggtaggtg

SEQ ID NO: 3007 - RNA, 81 nt, synthetic construct
  source 1..81: mol_type = other RNA
ggctgagaaggcggagaggagccctgtgacattcttcgacacgccccccatgctctttgtgttcattgccctggggcggtg

SEQ ID NO: 3008 - RNA, 81 nt, synthetic construct
  source 1..81: mol_type = other RNA
ggctgagaaggcggagaggagccctgtgacattcttcgacacgccccccatgctctttgtgttcattgccctgggtagatg

SEQ ID NO: 3009 - RNA, 81 nt, synthetic construct
  source 1..81: mol_type = other RNA
ggctgagaaggcggagaggagccctgtgacattcttcgacacgccccccatgctctttgtgttcattgccctgggtcggtg

SEQ ID NO: 3010 - RNA, 81 nt, synthetic construct
  source 1..81: mol_type = other RNA
ggctgagaaggcggagaggagccctgtgacattcttcgacacgccccccatgctctttgtgttcattgccctgggacggtg

SEQ ID NO: 3011 - RNA, 81 nt, synthetic construct
  source 1..81: mol_type = other RNA
ggctgagaaggcggagaggagccctgtgacattcttcgacacgccccccatgctctttgtgttcattgccctgggcagatg

SEQ ID NO: 3012 - RNA, 81 nt, synthetic construct
  source 1..81: mol_type = other RNA
ggctgagaaggcggagaggagccctgtgacattcttcgacacgccccccatgctctttgtgttcattgccctgggccggtg

SEQ ID NO: 3013 - RNA, 81 nt, synthetic construct
  source 1..81: mol_type = other RNA
ggctgagaaggcggagaggagccctgtgacattcttcgacacgccccccatgctctttgtgttcattgccctggggagatg

SEQ ID NO: 3014 - RNA, 81 nt, synthetic construct
  source 1..81: mol_type = other RNA
ggctgagaaggcggagaggagccctgtgacattcttcgacacgccccccatgctctttgtgttcattgccctgggcaggtg

SEQ ID NO: 3015 - RNA, 81 nt, synthetic construct
  source 1..81: mol_type = other RNA
ggctgagaaggcggagaggagccctgtgacattcttcgacacgccccccatgctctttgtgttcattgccctggggaggtg

SEQ ID NO: 3016 - RNA, 82 nt, synthetic construct
  source 1..82: mol_type = other RNA
tggctgagaaggcggagaggagccctgtgacattcttcgacacgccccccatgctctttgtgttcattgccctggggcggtg

SEQ ID NO: 3017 - RNA, 82 nt, synthetic construct
  source 1..82: mol_type = other RNA
tggctgagaaggcggagaggagccctgtgacattcttcgacacgccccccatgctctttgtgttcattgccctgggaagatg

SEQ ID NO: 3018 - RNA, 82 nt, synthetic construct
  source 1..82: mol_type = other RNA
tggctgagaaggcggagaggagccctgtgacattcttcgacacgccccccatgctctttgtgttcattgccctgggcagatg

SEQ ID NO: 3019 - RNA, 82 nt, synthetic construct
  source 1..82: mol_type = other RNA
tggctgagaaggcggagaggagccctgtgacattcttcgacacgccccccatgctctttgtgttcattgccctgggccggtg

SEQ ID NO: 3020 - RNA, 82 nt, synthetic construct
  source 1..82: mol_type = other RNA
tggctgagaaggcggagaggagccctgtgacattcttcgacacgccccccatgctctttgtgttcattgccctgggtaggtg

SEQ ID NO: 3021 - RNA, 82 nt, synthetic construct
  source 1..82: mol_type = other RNA
tggctgagaaggcggagaggagccctgtgacattcttcgacacgccccccatgctctttgtgttcattgccctggggagatg

SEQ ID NO: 3022 - RNA, 82 nt, synthetic construct
  source 1..82: mol_type = other RNA
tggctgagaaggcggagaggagccctgtgacattcttcgacacgccccccatgctctttgtgttcattgccctgggaaggtg

SEQ ID NO: 3023 - RNA, 82 nt, synthetic construct
  source 1..82: mol_type = other RNA
tggctgagaaggcggagaggagccctgtgacattcttcgacacgccccccatgctctttgtgttcattgccctgggcaggtg

SEQ ID NO: 3024 - RNA, 82 nt, synthetic construct
  source 1..82: mol_type = other RNA
tggctgagaaggcggagaggagccctgtgacattcttcgacacgccccccatgctctttgtgttcattgccctggggaggtg

SEQ ID NO: 3025 - RNA, 82 nt, synthetic construct
  source 1..82: mol_type = other RNA
tggctgagaaggcggagaggagccctgtgacattcttcgacacgccccccatgctctttgtgttcattgccctgggtcggtg

SEQ ID NO: 3026 - RNA, 82 nt, synthetic construct
  source 1..82: mol_type = other RNA
tggctgagaaggcggagaggagccctgtgacattcttcgacacgccccccatgctctttgtgttcattgccctgggtagatg

SEQ ID NO: 3027 - RNA, 82 nt, synthetic construct
  source 1..82: mol_type = other RNA
tggctgagaaggcggagaggagccctgtgacattcttcgacacgccccccatgctctttgtgttcattgccctgggacggtg

SEQ ID NO: 3028 - RNA, 83 nt, synthetic construct
  source 1..83: mol_type = other RNA
gtggctgagaaggcggagaggagccctgtgacattcttcgacacgccccccatgctctttgtgttcattgccctggggagatg

SEQ ID NO: 3029 - RNA, 83 nt, synthetic construct
  source 1..83: mol_type = other RNA
gtggctgagaaggcggagaggagccctgtgacattcttcgacacgccccccatgctctttgtgttcattgccctgggcagatg

SEQ ID NO: 3030 - RNA, 83 nt, synthetic construct
  source 1..83: mol_type = other RNA
gtggctgagaaggcggagaggagccctgtgacattcttcgacacgccccccatgctctttgtgttcattgccctgggtagatg

SEQ ID NO: 3031 - RNA, 83 nt, synthetic construct
  source 1..83: mol_type = other RNA
gtggctgagaaggcggagaggagccctgtgacattcttcgacacgccccccatgctctttgtgttcattgccctgggacggtg

SEQ ID NO: 3032 - RNA, 83 nt, synthetic construct
  source 1..83: mol_type = other RNA
gtggctgagaaggcggagaggagccctgtgacattcttcgacacgccccccatgctctttgtgttcattgccctgggtcggtg

SEQ ID NO: 3033 - RNA, 83 nt, synthetic construct
  source 1..83: mol_type = other RNA
gtggctgagaaggcggagaggagccctgtgacattcttcgacacgccccccatgctctttgtgttcattgccctgggaagatg

SEQ ID NO: 3034 - RNA, 83 nt, synthetic construct
  source 1..83: mol_type = other RNA
gtggctgagaaggcggagaggagccctgtgacattcttcgacacgccccccatgctctttgtgttcattgccctgggcaggtg

SEQ ID NO: 3035 - RNA, 83 nt, synthetic construct
  source 1..83: mol_type = other RNA
gtggctgagaaggcggagaggagccctgtgacattcttcgacacgccccccatgctctttgtgttcattgccctggggaggtg

SEQ ID NO: 3036 - RNA, 83 nt, synthetic construct
  source 1..83: mol_type = other RNA
gtggctgagaaggcggagaggagccctgtgacattcttcgacacgccccccatgctctttgtgttcattgccctgggtaggtg

SEQ ID NO: 3037 - RNA, 83 nt, synthetic construct
  source 1..83: mol_type = other RNA
gtggctgagaaggcggagaggagccctgtgacattcttcgacacgccccccatgctctttgtgttcattgccctgggaaggtg

SEQ ID NO: 3038 - RNA, 83 nt, synthetic construct
  source 1..83: mol_type = other RNA
gtggctgagaaggcggagaggagccctgtgacattcttcgacacgccccccatgctctttgtgttcattgccctgggccggtg

SEQ ID NO: 3039 - RNA, 83 nt, synthetic construct
  source 1..83: mol_type = other RNA
gtggctgagaaggcggagaggagccctgtgacattcttcgacacgccccccatgctctttgtgttcattgccctggggcggtg

SEQ ID NO: 3040 - RNA, 84 nt, synthetic construct
  source 1..84: mol_type = other RNA
tgtggctgagaaggcggagaggagccctgtgacattcttcgacacgccccccatgctctttgtgttcattgccctgggcagatg

SEQ ID NO: 3041 - RNA, 84 nt, synthetic construct
  source 1..84: mol_type = other RNA
tgtggctgagaaggcggagaggagccctgtgacattcttcgacacgccccccatgctctttgtgttcattgccctggggaggtg

SEQ ID NO: 3042 - RNA, 84 nt, synthetic construct
  source 1..84: mol_type = other RNA
tgtggctgagaaggcggagaggagccctgtgacattcttcgacacgccccccatgctctttgtgttcattgccctgggtaggtg

SEQ ID NO: 3043 - RNA, 84 nt, synthetic construct
  source 1..84: mol_type = other RNA
tgtggctgagaaggcggagaggagccctgtgacattcttcgacacgccccccatgctctttgtgttcattgccctgggacggtg

SEQ ID NO: 3044 - RNA, 84 nt, synthetic construct
  source 1..84: mol_type = other RNA
tgtggctgagaaggcggagaggagccctgtgacattcttcgacacgccccccatgctctttgtgttcattgccctgggtagatg

SEQ ID NO: 3045 - RNA, 84 nt, synthetic construct
  source 1..84: mol_type = other RNA
tgtggctgagaaggcggagaggagccctgtgacattcttcgacacgccccccatgctctttgtgttcattgccctggggcggtg

SEQ ID NO: 3046 - RNA, 84 nt, synthetic construct
  source 1..84: mol_type = other RNA
tgtggctgagaaggcggagaggagccctgtgacattcttcgacacgccccccatgctctttgtgttcattgccctgggaagatg

SEQ ID NO: 3047 - RNA, 84 nt, synthetic construct
  source 1..84: mol_type = other RNA
tgtggctgagaaggcggagaggagccctgtgacattcttcgacacgccccccatgctctttgtgttcattgccctgggccggtg

SEQ ID NO: 3048 - RNA, 84 nt, synthetic construct
  source 1..84: mol_type = other RNA
tgtggctgagaaggcggagaggagccctgtgacattcttcgacacgccccccatgctctttgtgttcattgccctgggcaggtg

SEQ ID NO: 3049 - RNA, 84 nt, synthetic construct
  source 1..84: mol_type = other RNA
tgtggctgagaaggcggagaggagccctgtgacattcttcgacacgccccccatgctctttgtgttcattgccctgggaaggtg

SEQ ID NO: 3050 - RNA, 84 nt, synthetic construct
  source 1..84: mol_type = other RNA
tgtggctgagaaggcggagaggagccctgtgacattcttcgacacgccccccatgctctttgtgttcattgccctggggagatg

SEQ ID NO: 3051 - RNA, 84 nt, synthetic construct
  source 1..84: mol_type = other RNA
tgtggctgagaaggcggagaggagccctgtgacattcttcgacacgccccccatgctctttgtgttcattgccctgggtcggtg

SEQ ID NO: 3052 - RNA, 85 nt, synthetic construct
  source 1..85: mol_type = other RNA
ctgtggctgagaaggcggagaggagccctgtgacattcttcgacacgccccccatgctctttgtgttcattgccctgggacggtg

SEQ ID NO: 3053 - RNA, 85 nt, synthetic construct
  source 1..85: mol_type = other RNA
ctgtggctgagaaggcggagaggagccctgtgacattcttcgacacgccccccatgctctttgtgttcattgccctgggcagatg

SEQ ID NO: 3054 - RNA, 85 nt, synthetic construct
  source 1..85: mol_type = other RNA
ctgtggctgagaaggcggagaggagccctgtgacattcttcgacacgccccccatgctctttgtgttcattgccctgggaagatg

SEQ ID NO: 3055 - RNA, 85 nt, synthetic construct
  source 1..85: mol_type = other RNA
ctgtggctgagaaggcggagaggagccctgtgacattcttcgacacgccccccatgctctttgtgttcattgccctgggtaggtg

SEQ ID NO: 3056 - RNA, 85 nt, synthetic construct
  source 1..85: mol_type = other RNA
ctgtggctgagaaggcggagaggagccctgtgacattcttcgacacgccccccatgctctttgtgttcattgccctgggtcggtg

SEQ ID NO: 3057 - RNA, 85 nt, synthetic construct
  source 1..85: mol_type = other RNA
ctgtggctgagaaggcggagaggagccctgtgacattcttcgacacgccccccatgctctttgtgttcattgccctggggagatg

SEQ ID NO: 3058 - RNA, 85 nt, synthetic construct
  source 1..85: mol_type = other RNA
ctgtggctgagaaggcggagaggagccctgtgacattcttcgacacgccccccatgctctttgtgttcattgccctggggcggtg

SEQ ID NO: 3059 - RNA, 85 nt, synthetic construct
  source 1..85: mol_type = other RNA
ctgtggctgagaaggcggagaggagccctgtgacattcttcgacacgccccccatgctctttgtgttcattgccctgggaaggtg

SEQ ID NO: 3060 - RNA, 85 nt, synthetic construct
  source 1..85: mol_type = other RNA
ctgtggctgagaaggcggagaggagccctgtgacattcttcgacacgccccccatgctctttgtgttcattgccctgggcaggtg

SEQ ID NO: 3061 - RNA, 85 nt, synthetic construct
  source 1..85: mol_type = other RNA
ctgtggctgagaaggcggagaggagccctgtgacattcttcgacacgccccccatgctctttgtgttcattgccctgggccggtg

SEQ ID NO: 3062 - RNA, 85 nt, synthetic construct
  source 1..85: mol_type = other RNA
ctgtggctgagaaggcggagaggagccctgtgacattcttcgacacgccccccatgctctttgtgttcattgccctggggaggtg

SEQ ID NO: 3063 - RNA, 85 nt, synthetic construct
  source 1..85: mol_type = other RNA
ctgtggctgagaaggcggagaggagccctgtgacattcttcgacacgccccccatgctctttgtgttcattgccctgggtagatg

SEQ ID NO: 3064 - RNA, 86 nt, synthetic construct
  source 1..86: mol_type = other RNA
gctgtggctgagaaggcggagaggagccctgtgacattcttcgacacgccccccatgctctttgtgttcattgccctgggtagatg

SEQ ID NO: 3065 - RNA, 86 nt, synthetic construct
  source 1..86: mol_type = other RNA
gctgtggctgagaaggcggagaggagccctgtgacattcttcgacacgccccccatgctctttgtgttcattgccctgggcaggtg

SEQ ID NO: 3066 - RNA, 86 nt, synthetic construct
  source 1..86: mol_type = other RNA
gctgtggctgagaaggcggagaggagccctgtgacattcttcgacacgccccccatgctctttgtgttcattgccctggggagatg

SEQ ID NO: 3067 - RNA, 86 nt, synthetic construct
  source 1..86: mol_type = other RNA
gctgtggctgagaaggcggagaggagccctgtgacattcttcgacacgccccccatgctctttgtgttcattgccctgggtcggtg

SEQ ID NO: 3068 - RNA, 86 nt, synthetic construct
  source 1..86: mol_type = other RNA
gctgtggctgagaaggcggagaggagccctgtgacattcttcgacacgccccccatgctctttgtgttcattgccctggggaggtg

SEQ ID NO: 3069 - RNA, 86 nt, synthetic construct
  source 1..86: mol_type = other RNA
gctgtggctgagaaggcggagaggagccctgtgacattcttcgacacgccccccatgctctttgtgttcattgccctgggacggtg

SEQ ID NO: 3070 - RNA, 86 nt, synthetic construct
  source 1..86: mol_type = other RNA
gctgtggctgagaaggcggagaggagccctgtgacattcttcgacacgccccccatgctctttgtgttcattgccctggggcggtg

SEQ ID NO: 3071 - RNA, 86 nt, synthetic construct
  source 1..86: mol_type = other RNA
gctgtggctgagaaggcggagaggagccctgtgacattcttcgacacgccccccatgctctttgtgttcattgccctgggcagatg

SEQ ID NO: 3072 - RNA, 86 nt, synthetic construct
  source 1..86: mol_type = other RNA
gctgtggctgagaaggcggagaggagccctgtgacattcttcgacacgccccccatgctctttgtgttcattgccctgggtaggtg

SEQ ID NO: 3073 - RNA, 86 nt, synthetic construct
  source 1..86: mol_type = other RNA
gctgtggctgagaaggcggagaggagccctgtgacattcttcgacacgccccccatgctctttgtgttcattgccctgggccggtg

SEQ ID NO: 3074 - RNA, 86 nt, synthetic construct
  source 1..86: mol_type = other RNA
gctgtggctgagaaggcggagaggagccctgtgacattcttcgacacgccccccatgctctttgtgttcattgccctgggaaggtg

SEQ ID NO: 3075 - RNA, 86 nt, synthetic construct
  source 1..86: mol_type = other RNA
gctgtggctgagaaggcggagaggagccctgtgacattcttcgacacgccccccatgctctttgtgttcattgccctgggaagatg

SEQ ID NO: 3076 - RNA, 87 nt, synthetic construct
  source 1..87: mol_type = other RNA
tgctgtggctgagaaggcggagaggagccctgtgacattcttcgacacgccccccatgctctttgtgttcattgccctggggaggtg

SEQ ID NO: 3077 - RNA, 87 nt, synthetic construct
  source 1..87: mol_type = other RNA
tgctgtggctgagaaggcggagaggagccctgtgacattcttcgacacgccccccatgctctttgtgttcattgccctggggcggtg

SEQ ID NO: 3078 - RNA, 87 nt, synthetic construct
  source 1..87: mol_type = other RNA
tgctgtggctgagaaggcggagaggagccctgtgacattcttcgacacgccccccatgctctttgtgttcattgccctgggcaggtg

SEQ ID NO: 3079 - RNA, 87 nt, synthetic construct
  source 1..87: mol_type = other RNA
tgctgtggctgagaaggcggagaggagccctgtgacattcttcgacacgccccccatgctctttgtgttcattgccctgggaagatg

SEQ ID NO: 3080 - RNA, 87 nt, synthetic construct
  source 1..87: mol_type = other RNA
tgctgtggctgagaaggcggagaggagccctgtgacattcttcgacacgccccccatgctctttgtgttcattgccctgggacggtg

SEQ ID NO: 3081 - RNA, 87 nt, synthetic construct
  source 1..87: mol_type = other RNA
tgctgtggctgagaaggcggagaggagccctgtgacattcttcgacacgccccccatgctctttgtgttcattgccctgggcagatg

SEQ ID NO: 3082 - RNA, 87 nt, synthetic construct
  source 1..87: mol_type = other RNA
tgctgtggctgagaaggcggagaggagccctgtgacattcttcgacacgccccccatgctctttgtgttcattgccctgggtagatg

SEQ ID NO: 3083 - RNA, 87 nt, synthetic construct
  source 1..87: mol_type = other RNA
tgctgtggctgagaaggcggagaggagccctgtgacattcttcgacacgccccccatgctctttgtgttcattgccctggggagatg

SEQ ID NO: 3084 - RNA, 87 nt, synthetic construct
  source 1..87: mol_type = other RNA
tgctgtggctgagaaggcggagaggagccctgtgacattcttcgacacgccccccatgctctttgtgttcattgccctgggccggtg

SEQ ID NO: 3085 - RNA, 87 nt, synthetic construct
  source 1..87: mol_type = other RNA
tgctgtggctgagaaggcggagaggagccctgtgacattcttcgacacgccccccatgctctttgtgttcattgccctgggtaggtg

SEQ ID NO: 3086 - RNA, 87 nt, synthetic construct
  source 1..87: mol_type = other RNA
tgctgtggctgagaaggcggagaggagccctgtgacattcttcgacacgccccccatgctctttgtgttcattgccctgggaaggtg

SEQ ID NO: 3087 - RNA, 87 nt, synthetic construct
  source 1..87: mol_type = other RNA
tgctgtggctgagaaggcggagaggagccctgtgacattcttcgacacgccccccatgctctttgtgttcattgccctgggtcggtg

SEQ ID NO: 3088 - RNA, 88 nt, synthetic construct
  source 1..88: mol_type = other RNA
ttgctgtggctgagaaggcggagaggagccctgtgacattcttcgacacgccccccatgctctttgtgttcattgccctgggtaggtg

SEQ ID NO: 3089 - RNA, 88 nt, synthetic construct
  source 1..88: mol_type = other RNA
ttgctgtggctgagaaggcggagaggagccctgtgacattcttcgacacgccccccatgctctttgtgttcattgccctgggtcggtg

SEQ ID NO: 3090 - RNA, 88 nt, synthetic construct
  source 1..88: mol_type = other RNA
ttgctgtggctgagaaggcggagaggagccctgtgacattcttcgacacgccccccatgctctttgtgttcattgccctgggcaggtg

SEQ ID NO: 3091 - RNA, 88 nt, synthetic construct
  source 1..88: mol_type = other RNA
ttgctgtggctgagaaggcggagaggagccctgtgacattcttcgacacgccccccatgctctttgtgttcattgccctgggaagatg

SEQ ID NO: 3092 - RNA, 88 nt, synthetic construct
  source 1..88: mol_type = other RNA
ttgctgtggctgagaaggcggagaggagccctgtgacattcttcgacacgccccccatgctctttgtgttcattgccctgggccggtg

SEQ ID NO: 3093 - RNA, 88 nt, synthetic construct
  source 1..88: mol_type = other RNA
ttgctgtggctgagaaggcggagaggagccctgtgacattcttcgacacgccccccatgctctttgtgttcattgccctggggagatg

SEQ ID NO: 3094 - RNA, 88 nt, synthetic construct
  source 1..88: mol_type = other RNA
ttgctgtggctgagaaggcggagaggagccctgtgacattcttcgacacgccccccatgctctttgtgttcattgccctggggcggtg

SEQ ID NO: 3095 - RNA, 88 nt, synthetic construct
  source 1..88: mol_type = other RNA
ttgctgtggctgagaaggcggagaggagccctgtgacattcttcgacacgccccccatgctctttgtgttcattgccctggggaggtg

SEQ ID NO: 3096 - RNA, 88 nt, synthetic construct
  source 1..88: mol_type = other RNA
ttgctgtggctgagaaggcggagaggagccctgtgacattcttcgacacgccccccatgctctttgtgttcattgccctgggtagatg

SEQ ID NO: 3097 - RNA, 88 nt, synthetic construct
  source 1..88: mol_type = other RNA
ttgctgtggctgagaaggcggagaggagccctgtgacattcttcgacacgccccccatgctctttgtgttcattgccctgggaaggtg

SEQ ID NO: 3098 - RNA, 88 nt, synthetic construct
  source 1..88: mol_type = other RNA
ttgctgtggctgagaaggcggagaggagccctgtgacattcttcgacacgccccccatgctctttgtgttcattgccctgggacggtg

SEQ ID NO: 3099 - RNA, 88 nt, synthetic construct
  source 1..88: mol_type = other RNA
ttgctgtggctgagaaggcggagaggagccctgtgacattcttcgacacgccccccatgctctttgtgttcattgccctgggcagatg

SEQ ID NO: 3100 - RNA, 89 nt, synthetic construct
  source 1..89: mol_type = other RNA
gttgctgtggctgagaaggcggagaggagccctgtgacattcttcgacacgccccccatgctctttgtgttcattgccctgggcaggtg

SEQ ID NO: 3101 - RNA, 89 nt, synthetic construct
  source 1..89: mol_type = other RNA
gttgctgtggctgagaaggcggagaggagccctgtgacattcttcgacacgccccccatgctctttgtgttcattgccctgggaaggtg

SEQ ID NO: 3102 - RNA, 89 nt, synthetic construct
  source 1..89: mol_type = other RNA
gttgctgtggctgagaaggcggagaggagccctgtgacattcttcgacacgccccccatgctctttgtgttcattgccctgggccggtg

SEQ ID NO: 3103 - RNA, 89 nt, synthetic construct
  source 1..89: mol_type = other RNA
gttgctgtggctgagaaggcggagaggagccctgtgacattcttcgacacgccccccatgctctttgtgttcattgccctgggcagatg

SEQ ID NO: 3104 - RNA, 89 nt, synthetic construct
  source 1..89: mol_type = other RNA
gttgctgtggctgagaaggcggagaggagccctgtgacattcttcgacacgccccccatgctctttgtgttcattgccctgggacggtg

SEQ ID NO: 3105 - RNA, 89 nt, synthetic construct
  source 1..89: mol_type = other RNA
gttgctgtggctgagaaggcggagaggagccctgtgacattcttcgacacgccccccatgctctttgtgttcattgccctggggagatg

SEQ ID NO: 3106 - RNA, 89 nt, synthetic construct
  source 1..89: mol_type = other RNA
gttgctgtggctgagaaggcggagaggagccctgtgacattcttcgacacgccccccatgctctttgtgttcattgccctggggaggtg

SEQ ID NO: 3107 - RNA, 89 nt, synthetic construct
  source 1..89: mol_type = other RNA
gttgctgtggctgagaaggcggagaggagccctgtgacattcttcgacacgccccccatgctctttgtgttcattgccctgggtcggtg

SEQ ID NO: 3108 - RNA, 89 nt, synthetic construct
  source 1..89: mol_type = other RNA
gttgctgtggctgagaaggcggagaggagccctgtgacattcttcgacacgccccccatgctctttgtgttcattgccctgggtagatg

SEQ ID NO: 3109 - RNA, 89 nt, synthetic construct
  source 1..89: mol_type = other RNA
gttgctgtggctgagaaggcggagaggagccctgtgacattcttcgacacgccccccatgctctttgtgttcattgccctggggcggtg

SEQ ID NO: 3110 - RNA, 89 nt, synthetic construct
  source 1..89: mol_type = other RNA
gttgctgtggctgagaaggcggagaggagccctgtgacattcttcgacacgccccccatgctctttgtgttcattgccctgggaagatg

SEQ ID NO: 3111 - RNA, 89 nt, synthetic construct
  source 1..89: mol_type = other RNA
gttgctgtggctgagaaggcggagaggagccctgtgacattcttcgacacgccccccatgctctttgtgttcattgccctgggtaggtg

SEQ ID NO: 3112 - RNA, 90 nt, synthetic construct
  source 1..90: mol_type = other RNA
ggttgctgtggctgagaaggcggagaggagccctgtgacattcttcgacacgccccccatgctctttgtgttcattgccctgggtcggtg

SEQ ID NO: 3113 - RNA, 90 nt, synthetic construct
  source 1..90: mol_type = other RNA
ggttgctgtggctgagaaggcggagaggagccctgtgacattcttcgacacgccccccatgctctttgtgttcattgccctgggcagatg

SEQ ID NO: 3114 - RNA, 90 nt, synthetic construct
  source 1..90: mol_type = other RNA
ggttgctgtggctgagaaggcggagaggagccctgtgacattcttcgacacgccccccatgctctttgtgttcattgccctgggccggtg

SEQ ID NO: 3115 - RNA, 90 nt, synthetic construct
  source 1..90: mol_type = other RNA
ggttgctgtggctgagaaggcggagaggagccctgtgacattcttcgacacgccccccatgctctttgtgttcattgccctgggtaggtg

SEQ ID NO: 3116 - RNA, 90 nt, synthetic construct
  source 1..90: mol_type = other RNA
ggttgctgtggctgagaaggcggagaggagccctgtgacattcttcgacacgccccccatgctctttgtgttcattgccctggggaggtg

SEQ ID NO: 3117 - RNA, 90 nt, synthetic construct
  source 1..90: mol_type = other RNA
ggttgctgtggctgagaaggcggagaggagccctgtgacattcttcgacacgccccccatgctctttgtgttcattgccctgggacggtg

SEQ ID NO: 3118 - RNA, 90 nt, synthetic construct
  source 1..90: mol_type = other RNA
ggttgctgtggctgagaaggcggagaggagccctgtgacattcttcgacacgccccccatgctctttgtgttcattgccctgggtagatg

SEQ ID NO: 3119 - RNA, 90 nt, synthetic construct
  source 1..90: mol_type = other RNA
ggttgctgtggctgagaaggcggagaggagccctgtgacattcttcgacacgccccccatgctctttgtgttcattgccctgggaagatg

SEQ ID NO: 3120 - RNA, 90 nt, synthetic construct
  source 1..90: mol_type = other RNA
ggttgctgtggctgagaaggcggagaggagccctgtgacattcttcgacacgccccccatgctctttgtgttcattgccctgggcaggtg

SEQ ID NO: 3121 - RNA, 90 nt, synthetic construct
  source 1..90: mol_type = other RNA
ggttgctgtggctgagaaggcggagaggagccctgtgacattcttcgacacgccccccatgctctttgtgttcattgccctggggcggtg

SEQ ID NO: 3122 - RNA, 90 nt, synthetic construct
  source 1..90: mol_type = other RNA
ggttgctgtggctgagaaggcggagaggagccctgtgacattcttcgacacgccccccatgctctttgtgttcattgccctgggaaggtg

SEQ ID NO: 3123 - RNA, 90 nt, synthetic construct
  source 1..90: mol_type = other RNA
ggttgctgtggctgagaaggcggagaggagccctgtgacattcttcgacacgccccccatgctctttgtgttcattgccctggggagatg

SEQ ID NO: 3124 - RNA, 91 nt, synthetic construct
  source 1..91: mol_type = other RNA
tggttgctgtggctgagaaggcggagaggagccctgtgacattcttcgacacgccccccatgctctttgtgttcattgccctgggtagatg

SEQ ID NO: 3125 - RNA, 91 nt, synthetic construct
  source 1..91: mol_type = other RNA
tggttgctgtggctgagaaggcggagaggagccctgtgacattcttcgacacgccccccatgctctttgtgttcattgccctgggccggtg

SEQ ID NO: 3126 - RNA, 91 nt, synthetic construct
  source 1..91: mol_type = other RNA
tggttgctgtggctgagaaggcggagaggagccctgtgacattcttcgacacgccccccatgctctttgtgttcattgccctggggagatg

SEQ ID NO: 3127 - RNA, 91 nt, synthetic construct
  source 1..91: mol_type = other RNA
tggttgctgtggctgagaaggcggagaggagccctgtgacattcttcgacacgccccccatgctctttgtgttcattgccctggggcggtg

SEQ ID NO: 3128 - RNA, 91 nt, synthetic construct
  source 1..91: mol_type = other RNA
tggttgctgtggctgagaaggcggagaggagccctgtgacattcttcgacacgccccccatgctctttgtgttcattgccctgggtcggtg

SEQ ID NO: 3129 - RNA, 91 nt, synthetic construct
  source 1..91: mol_type = other RNA
tggttgctgtggctgagaaggcggagaggagccctgtgacattcttcgacacgccccccatgctctttgtgttcattgccctgggaaggtg

SEQ ID NO: 3130 - RNA, 91 nt, synthetic construct
  source 1..91: mol_type = other RNA
tggttgctgtggctgagaaggcggagaggagccctgtgacattcttcgacacgccccccatgctctttgtgttcattgccctgggaagatg

SEQ ID NO: 3131 - RNA, 91 nt, synthetic construct
  source 1..91: mol_type = other RNA
tggttgctgtggctgagaaggcggagaggagccctgtgacattcttcgacacgccccccatgctctttgtgttcattgccctgggtaggtg

SEQ ID NO: 3132 - RNA, 91 nt, synthetic construct
  source 1..91: mol_type = other RNA
tggttgctgtggctgagaaggcggagaggagccctgtgacattcttcgacacgccccccatgctctttgtgttcattgccctgggcagatg

SEQ ID NO: 3133 - RNA, 91 nt, synthetic construct
  source 1..91: mol_type = other RNA
tggttgctgtggctgagaaggcggagaggagccctgtgacattcttcgacacgccccccatgctctttgtgttcattgccctggggaggtg

SEQ ID NO: 3134 - RNA, 91 nt, synthetic construct
  source 1..91: mol_type = other RNA
tggttgctgtggctgagaaggcggagaggagccctgtgacattcttcgacacgccccccatgctctttgtgttcattgccctgggcaggtg

SEQ ID NO: 3135 - RNA, 91 nt, synthetic construct
  source 1..91: mol_type = other RNA
tggttgctgtggctgagaaggcggagaggagccctgtgacattcttcgacacgccccccatgctctttgtgttcattgccctgggacggtg

SEQ ID NO: 3136 - RNA, 92 nt, synthetic construct
  source 1..92: mol_type = other RNA
gtggttgctgtggctgagaaggcggagaggagccctgtgacattcttcgacacgccccccatgctctttgtgttcattgccctgggaagatg

SEQ ID NO: 3137 - RNA, 92 nt, synthetic construct
  source 1..92: mol_type = other RNA
gtggttgctgtggctgagaaggcggagaggagccctgtgacattcttcgacacgccccccatgctctttgtgttcattgccctgggtcggtg

SEQ ID NO: 3138 - RNA, 92 nt, synthetic construct
  source 1..92: mol_type = other RNA
gtggttgctgtggctgagaaggcggagaggagccctgtgacattcttcgacacgccccccatgctctttgtgttcattgccctggggaggtg

SEQ ID NO: 3139 - RNA, 92 nt, synthetic construct
  source 1..92: mol_type = other RNA
gtggttgctgtggctgagaaggcggagaggagccctgtgacattcttcgacacgccccccatgctctttgtgttcattgccctgggtagatg

SEQ ID NO: 3140 - RNA, 92 nt, synthetic construct
  source 1..92: mol_type = other RNA
gtggttgctgtggctgagaaggcggagaggagccctgtgacattcttcgacacgccccccatgctctttgtgttcattgccctggggagatg

SEQ ID NO: 3141 - RNA, 92 nt, synthetic construct
  source 1..92: mol_type = other RNA
gtggttgctgtggctgagaaggcggagaggagccctgtgacattcttcgacacgccccccatgctctttgtgttcattgccctggggcggtg

SEQ ID NO: 3142 - RNA, 92 nt, synthetic construct
  source 1..92: mol_type = other RNA
gtggttgctgtggctgagaaggcggagaggagccctgtgacattcttcgacacgccccccatgctctttgtgttcattgccctgggtaggtg

SEQ ID NO: 3143 - RNA, 92 nt, synthetic construct
  source 1..92: mol_type = other RNA
gtggttgctgtggctgagaaggcggagaggagccctgtgacattcttcgacacgccccccatgctctttgtgttcattgccctgggacggtg

SEQ ID NO: 3144 - RNA, 92 nt, synthetic construct
  source 1..92: mol_type = other RNA
gtggttgctgtggctgagaaggcggagaggagccctgtgacattcttcgacacgccccccatgctctttgtgttcattgccctgggcagatg

SEQ ID NO: 3145 - RNA, 92 nt, synthetic construct
  source 1..92: mol_type = other RNA
gtggttgctgtggctgagaaggcggagaggagccctgtgacattcttcgacacgccccccatgctctttgtgttcattgccctgggccggtg

SEQ ID NO: 3146 - RNA, 92 nt, synthetic construct
  source 1..92: mol_type = other RNA
gtggttgctgtggctgagaaggcggagaggagccctgtgacattcttcgacacgccccccatgctctttgtgttcattgccctgggaaggtg

SEQ ID NO: 3147 - RNA, 92 nt, synthetic construct
  source 1..92: mol_type = other RNA
gtggttgctgtggctgagaaggcggagaggagccctgtgacattcttcgacacgccccccatgctctttgtgttcattgccctgggcaggtg

SEQ ID NO: 3148 - RNA, 93 nt, synthetic construct
  source 1..93: mol_type = other RNA
ggtggttgctgtggctgagaaggcggagaggagccctgtgacattcttcgacacgccccccatgctctttgtgttcattgccctggggaggtg

SEQ ID NO: 3149 - RNA, 93 nt, synthetic construct
  source 1..93: mol_type = other RNA
ggtggttgctgtggctgagaaggcggagaggagccctgtgacattcttcgacacgccccccatgctctttgtgttcattgccctgggcaggtg

SEQ ID NO: 3150 - RNA, 93 nt, synthetic construct
  source 1..93: mol_type = other RNA
ggtggttgctgtggctgagaaggcggagaggagccctgtgacattcttcgacacgccccccatgctctttgtgttcattgccctgggtcggtg

SEQ ID NO: 3151 - RNA, 93 nt, synthetic construct
  source 1..93: mol_type = other RNA
ggtggttgctgtggctgagaaggcggagaggagccctgtgacattcttcgacacgccccccatgctctttgtgttcattgccctgggaaggtg

SEQ ID NO: 3152 - RNA, 93 nt, synthetic construct
  source 1..93: mol_type = other RNA
ggtggttgctgtggctgagaaggcggagaggagccctgtgacattcttcgacacgccccccatgctctttgtgttcattgccctgggtagatg

SEQ ID NO: 3153 - RNA, 93 nt, synthetic construct
  source 1..93: mol_type = other RNA
ggtggttgctgtggctgagaaggcggagaggagccctgtgacattcttcgacacgccccccatgctctttgtgttcattgccctgggaagatg

SEQ ID NO: 3154 - RNA, 93 nt, synthetic construct
  source 1..93: mol_type = other RNA
ggtggttgctgtggctgagaaggcggagaggagccctgtgacattcttcgacacgccccccatgctctttgtgttcattgccctggggcggtg

SEQ ID NO: 3155 - RNA, 93 nt, synthetic construct
  source 1..93: mol_type = other RNA
ggtggttgctgtggctgagaaggcggagaggagccctgtgacattcttcgacacgccccccatgctctttgtgttcattgccctgggtaggtg

SEQ ID NO: 3156 - RNA, 93 nt, synthetic construct
  source 1..93: mol_type = other RNA
ggtggttgctgtggctgagaaggcggagaggagccctgtgacattcttcgacacgccccccatgctctttgtgttcattgccctgggacggtg

SEQ ID NO: 3157 - RNA, 93 nt, synthetic construct
  source 1..93: mol_type = other RNA
ggtggttgctgtggctgagaaggcggagaggagccctgtgacattcttcgacacgccccccatgctctttgtgttcattgccctgggcagatg

SEQ ID NO: 3158 - RNA, 93 nt, synthetic construct
  source 1..93: mol_type = other RNA
ggtggttgctgtggctgagaaggcggagaggagccctgtgacattcttcgacacgccccccatgctctttgtgttcattgccctggggagatg

SEQ ID NO: 3159 - RNA, 93 nt, synthetic construct
  source 1..93: mol_type = other RNA
ggtggttgctgtggctgagaaggcggagaggagccctgtgacattcttcgacacgccccccatgctctttgtgttcattgccctgggccggtg

SEQ ID NO: 3160 - RNA, 94 nt, synthetic construct
  source 1..94: mol_type = other RNA
tggtggttgctgtggctgagaaggcggagaggagccctgtgacattcttcgacacgccccccatgctctttgtgttcattgccctgggaagatg

SEQ ID NO: 3161 - RNA, 94 nt, synthetic construct
  source 1..94: mol_type = other RNA
tggtggttgctgtggctgagaaggcggagaggagccctgtgacattcttcgacacgccccccatgctctttgtgttcattgccctgggtcggtg

SEQ ID NO: 3162 - RNA, 94 nt, synthetic construct
  source 1..94: mol_type = other RNA
tggtggttgctgtggctgagaaggcggagaggagccctgtgacattcttcgacacgccccccatgctctttgtgttcattgccctgggcagatg

SEQ ID NO: 3163 - RNA, 94 nt, synthetic construct
  source 1..94: mol_type = other RNA
tggtggttgctgtggctgagaaggcggagaggagccctgtgacattcttcgacacgccccccatgctctttgtgttcattgccctgggacggtg

SEQ ID NO: 3164 - RNA, 94 nt, synthetic construct
  source 1..94: mol_type = other RNA
tggtggttgctgtggctgagaaggcggagaggagccctgtgacattcttcgacacgccccccatgctctttgtgttcattgccctgggtagatg

SEQ ID NO: 3165 - RNA, 94 nt, synthetic construct
  source 1..94: mol_type = other RNA
tggtggttgctgtggctgagaaggcggagaggagccctgtgacattcttcgacacgccccccatgctctttgtgttcattgccctgggccggtg

SEQ ID NO: 3166 - RNA, 94 nt, synthetic construct
  source 1..94: mol_type = other RNA
tggtggttgctgtggctgagaaggcggagaggagccctgtgacattcttcgacacgccccccatgctctttgtgttcattgccctgggaaggtg

SEQ ID NO: 3167 - RNA, 94 nt, synthetic construct
  source 1..94: mol_type = other RNA
tggtggttgctgtggctgagaaggcggagaggagccctgtgacattcttcgacacgccccccatgctctttgtgttcattgccctgggcaggtg

SEQ ID NO: 3168 - RNA, 94 nt, synthetic construct
  source 1..94: mol_type = other RNA
tggtggttgctgtggctgagaaggcggagaggagccctgtgacattcttcgacacgccccccatgctctttgtgttcattgccctggggaggtg

SEQ ID NO: 3169 - RNA, 94 nt, synthetic construct
  source 1..94: mol_type = other RNA
tggtggttgctgtggctgagaaggcggagaggagccctgtgacattcttcgacacgccccccatgctctttgtgttcattgccctggggcggtg

SEQ ID NO: 3170 - RNA, 94 nt, synthetic construct
  source 1..94: mol_type = other RNA
tggtggttgctgtggctgagaaggcggagaggagccctgtgacattcttcgacacgccccccatgctctttgtgttcattgccctggggagatg

SEQ ID NO: 3171 - RNA, 94 nt, synthetic construct
  source 1..94: mol_type = other RNA
tggtggttgctgtggctgagaaggcggagaggagccctgtgacattcttcgacacgccccccatgctctttgtgttcattgccctgggtaggtg

SEQ ID NO: 3172 - RNA, 95 nt, synthetic construct
  source 1..95: mol_type = other RNA
ctggtggttgctgtggctgagaaggcggagaggagccctgtgacattcttcgacacgccccccatgctctttgtgttcattgccctgggcaggtg

SEQ ID NO: 3173 - RNA, 95 nt, synthetic construct
  source 1..95: mol_type = other RNA
ctggtggttgctgtggctgagaaggcggagaggagccctgtgacattcttcgacacgccccccatgctctttgtgttcattgccctgggaaggtg

SEQ ID NO: 3174 - RNA, 95 nt, synthetic construct
  source 1..95: mol_type = other RNA
ctggtggttgctgtggctgagaaggcggagaggagccctgtgacattcttcgacacgccccccatgctctttgtgttcattgccctgggtcggtg

SEQ ID NO: 3175 - RNA, 95 nt, synthetic construct
  source 1..95: mol_type = other RNA
ctggtggttgctgtggctgagaaggcggagaggagccctgtgacattcttcgacacgccccccatgctctttgtgttcattgccctggggcggtg

SEQ ID NO: 3176 - RNA, 95 nt, synthetic construct
  source 1..95: mol_type = other RNA
ctggtggttgctgtggctgagaaggcggagaggagccctgtgacattcttcgacacgccccccatgctctttgtgttcattgccctgggcagatg

SEQ ID NO: 3177 - RNA, 95 nt, synthetic construct
  source 1..95: mol_type = other RNA
ctggtggttgctgtggctgagaaggcggagaggagccctgtgacattcttcgacacgccccccatgctctttgtgttcattgccctggggagatg

SEQ ID NO: 3178 - RNA, 95 nt, synthetic construct
  source 1..95: mol_type = other RNA
ctggtggttgctgtggctgagaaggcggagaggagccctgtgacattcttcgacacgccccccatgctctttgtgttcattgccctgggtaggtg

SEQ ID NO: 3179 - RNA, 95 nt, synthetic construct
  source 1..95: mol_type = other RNA
ctggtggttgctgtggctgagaaggcggagaggagccctgtgacattcttcgacacgccccccatgctctttgtgttcattgccctgggacggtg

SEQ ID NO: 3180 - RNA, 95 nt, synthetic construct
  source 1..95: mol_type = other RNA
ctggtggttgctgtggctgagaaggcggagaggagccctgtgacattcttcgacacgccccccatgctctttgtgttcattgccctgggccggtg

SEQ ID NO: 3181 - RNA, 95 nt, synthetic construct
  source 1..95: mol_type = other RNA
ctggtggttgctgtggctgagaaggcggagaggagccctgtgacattcttcgacacgccccccatgctctttgtgttcattgccctggggaggtg

SEQ ID NO: 3182 - RNA, 95 nt, synthetic construct
  source 1..95: mol_type = other RNA
ctggtggttgctgtggctgagaaggcggagaggagccctgtgacattcttcgacacgccccccatgctctttgtgttcattgccctgggaagatg

SEQ ID NO: 3183 - RNA, 95 nt, synthetic construct
  source 1..95: mol_type = other RNA
ctggtggttgctgtggctgagaaggcggagaggagccctgtgacattcttcgacacgccccccatgctctttgtgttcattgccctgggtagatg

SEQ ID NO: 3184 - RNA, 96 nt, synthetic construct
  source 1..96: mol_type = other RNA
cctggtggttgctgtggctgagaaggcggagaggagccctgtgacattcttcgacacgccccccatgctctttgtgttcattgccctgggccggtg

SEQ ID NO: 3185 - RNA, 96 nt, synthetic construct
  source 1..96: mol_type = other RNA
cctggtggttgctgtggctgagaaggcggagaggagccctgtgacattcttcgacacgccccccatgctctttgtgttcattgccctgggtcggtg

SEQ ID NO: 3186 - RNA, 96 nt, synthetic construct
  source 1..96: mol_type = other RNA
cctggtggttgctgtggctgagaaggcggagaggagccctgtgacattcttcgacacgccccccatgctctttgtgttcattgccctgggaagatg

SEQ ID NO: 3187 - RNA, 96 nt, synthetic construct
  source 1..96: mol_type = other RNA
cctggtggttgctgtggctgagaaggcggagaggagccctgtgacattcttcgacacgccccccatgctctttgtgttcattgccctggggcggtg

SEQ ID NO: 3188 - RNA, 96 nt, synthetic construct
  source 1..96: mol_type = other RNA
cctggtggttgctgtggctgagaaggcggagaggagccctgtgacattcttcgacacgccccccatgctctttgtgttcattgccctggggagatg

SEQ ID NO: 3189 - RNA, 96 nt, synthetic construct
  source 1..96: mol_type = other RNA
cctggtggttgctgtggctgagaaggcggagaggagccctgtgacattcttcgacacgccccccatgctctttgtgttcattgccctgggtagatg

SEQ ID NO: 3190 - RNA, 96 nt, synthetic construct
  source 1..96: mol_type = other RNA
cctggtggttgctgtggctgagaaggcggagaggagccctgtgacattcttcgacacgccccccatgctctttgtgttcattgccctgggcagatg

SEQ ID NO: 3191 - RNA, 96 nt, synthetic construct
  source 1..96: mol_type = other RNA
cctggtggttgctgtggctgagaaggcggagaggagccctgtgacattcttcgacacgccccccatgctctttgtgttcattgccctgggaaggtg

SEQ ID NO: 3192 - RNA, 96 nt, synthetic construct
  source 1..96: mol_type = other RNA
cctggtggttgctgtggctgagaaggcggagaggagccctgtgacattcttcgacacgccccccatgctctttgtgttcattgccctggggaggtg

SEQ ID NO: 3193 - RNA, 96 nt, synthetic construct
  source 1..96: mol_type = other RNA
cctggtggttgctgtggctgagaaggcggagaggagccctgtgacattcttcgacacgccccccatgctctttgtgttcattgccctgggcaggtg

SEQ ID NO: 3194 - RNA, 96 nt, synthetic construct
  source 1..96: mol_type = other RNA
cctggtggttgctgtggctgagaaggcggagaggagccctgtgacattcttcgacacgccccccatgctctttgtgttcattgccctgggacggtg

SEQ ID NO: 3195 - RNA, 96 nt, synthetic construct
  source 1..96: mol_type = other RNA
cctggtggttgctgtggctgagaaggcggagaggagccctgtgacattcttcgacacgccccccatgctctttgtgttcattgccctgggtaggtg

SEQ ID NO: 3196 - RNA, 97 nt, synthetic construct
  source 1..97: mol_type = other RNA
tcctggtggttgctgtggctgagaaggcggagaggagccctgtgacattcttcgacacgccccccatgctctttgtgttcattgccctgggtagatg

SEQ ID NO: 3197 - RNA, 97 nt, synthetic construct
  source 1..97: mol_type = other RNA
tcctggtggttgctgtggctgagaaggcggagaggagccctgtgacattcttcgacacgccccccatgctctttgtgttcattgccctggggcggtg

SEQ ID NO: 3198 - RNA, 97 nt, synthetic construct
  source 1..97: mol_type = other RNA
tcctggtggttgctgtggctgagaaggcggagaggagccctgtgacattcttcgacacgccccccatgctctttgtgttcattgccctgggaagatg

SEQ ID NO: 3199 - RNA, 97 nt, synthetic construct
  source 1..97: mol_type = other RNA
tcctggtggttgctgtggctgagaaggcggagaggagccctgtgacattcttcgacacgccccccatgctctttgtgttcattgccctggggagatg

SEQ ID NO: 3200 - RNA, 97 nt, synthetic construct
  source 1..97: mol_type = other RNA
tcctggtggttgctgtggctgagaaggcggagaggagccctgtgacattcttcgacacgccccccatgctctttgtgttcattgccctgggtcggtg

SEQ ID NO: 3201 - RNA, 97 nt, synthetic construct
  source 1..97: mol_type = other RNA
tcctggtggttgctgtggctgagaaggcggagaggagccctgtgacattcttcgacacgccccccatgctctttgtgttcattgccctgggcaggtg

SEQ ID NO: 3202 - RNA, 97 nt, synthetic construct
  source 1..97: mol_type = other RNA
tcctggtggttgctgtggctgagaaggcggagaggagccctgtgacattcttcgacacgccccccatgctctttgtgttcattgccctgggaaggtg

SEQ ID NO: 3203 - RNA, 97 nt, synthetic construct
  source 1..97: mol_type = other RNA
tcctggtggttgctgtggctgagaaggcggagaggagccctgtgacattcttcgacacgccccccatgctctttgtgttcattgccctgggtaggtg

SEQ ID NO: 3204 - RNA, 97 nt, synthetic construct
  source 1..97: mol_type = other RNA
tcctggtggttgctgtggctgagaaggcggagaggagccctgtgacattcttcgacacgccccccatgctctttgtgttcattgccctggggaggtg

SEQ ID NO: 3205 - RNA, 97 nt, synthetic construct
  source 1..97: mol_type = other RNA
tcctggtggttgctgtggctgagaaggcggagaggagccctgtgacattcttcgacacgccccccatgctctttgtgttcattgccctgggacggtg

SEQ ID NO: 3206 - RNA, 97 nt, synthetic construct
  source 1..97: mol_type = other RNA
tcctggtggttgctgtggctgagaaggcggagaggagccctgtgacattcttcgacacgccccccatgctctttgtgttcattgccctgggccggtg

SEQ ID NO: 3207 - RNA, 97 nt, synthetic construct
  source 1..97: mol_type = other RNA
tcctggtggttgctgtggctgagaaggcggagaggagccctgtgacattcttcgacacgccccccatgctctttgtgttcattgccctgggcagatg

SEQ ID NO: 3208 - RNA, 98 nt, synthetic construct
  source 1..98: mol_type = other RNA
atcctggtggttgctgtggctgagaaggcggagaggagccctgtgacattcttcgacacgccccccatgctctttgtgttcattgccctgggtagatg

SEQ ID NO: 3209 - RNA, 98 nt, synthetic construct
  source 1..98: mol_type = other RNA
atcctggtggttgctgtggctgagaaggcggagaggagccctgtgacattcttcgacacgccccccatgctctttgtgttcattgccctgggaaggtg

SEQ ID NO: 3210 - RNA, 98 nt, synthetic construct
  source 1..98: mol_type = other RNA
atcctggtggttgctgtggctgagaaggcggagaggagccctgtgacattcttcgacacgccccccatgctctttgtgttcattgccctgggtaggtg

SEQ ID NO: 3211 - RNA, 98 nt, synthetic construct
  source 1..98: mol_type = other RNA
atcctggtggttgctgtggctgagaaggcggagaggagccctgtgacattcttcgacacgccccccatgctctttgtgttcattgccctggggagatg

SEQ ID NO: 3212 - RNA, 98 nt, synthetic construct
  source 1..98: mol_type = other RNA
atcctggtggttgctgtggctgagaaggcggagaggagccctgtgacattcttcgacacgccccccatgctctttgtgttcattgccctgggcagatg

SEQ ID NO: 3213 - RNA, 98 nt, synthetic construct
  source 1..98: mol_type = other RNA
atcctggtggttgctgtggctgagaaggcggagaggagccctgtgacattcttcgacacgccccccatgctctttgtgttcattgccctggggaggtg

SEQ ID NO: 3214 - RNA, 98 nt, synthetic construct
  source 1..98: mol_type = other RNA
atcctggtggttgctgtggctgagaaggcggagaggagccctgtgacattcttcgacacgccccccatgctctttgtgttcattgccctgggccggtg

SEQ ID NO: 3215 - RNA, 98 nt, synthetic construct
  source 1..98: mol_type = other RNA
atcctggtggttgctgtggctgagaaggcggagaggagccctgtgacattcttcgacacgccccccatgctctttgtgttcattgccctgggaagatg

SEQ ID NO: 3216 - RNA, 98 nt, synthetic construct
  source 1..98: mol_type = other RNA
atcctggtggttgctgtggctgagaaggcggagaggagccctgtgacattcttcgacacgccccccatgctctttgtgttcattgccctggggcggtg

SEQ ID NO: 3217 - RNA, 98 nt, synthetic construct
  source 1..98: mol_type = other RNA
atcctggtggttgctgtggctgagaaggcggagaggagccctgtgacattcttcgacacgccccccatgctctttgtgttcattgccctgggacggtg

SEQ ID NO: 3218 - RNA, 98 nt, synthetic construct
  source 1..98: mol_type = other RNA
atcctggtggttgctgtggctgagaaggcggagaggagccctgtgacattcttcgacacgccccccatgctctttgtgttcattgccctgggtcggtg

SEQ ID NO: 3219 - RNA, 98 nt, synthetic construct
  source 1..98: mol_type = other RNA
atcctggtggttgctgtggctgagaaggcggagaggagccctgtgacattcttcgacacgccccccatgctctttgtgttcattgccctgggcaggtg

SEQ ID NO: 3220 - RNA, 99 nt, synthetic construct
  source 1..99: mol_type = other RNA
catcctggtggttgctgtggctgagaaggcggagaggagccctgtgacattcttcgacacgccccccatgctctttgtgttcattgccctgggtaggtg

SEQ ID NO: 3221 - RNA, 99 nt, synthetic construct
  source 1..99: mol_type = other RNA
catcctggtggttgctgtggctgagaaggcggagaggagccctgtgacattcttcgacacgccccccatgctctttgtgttcattgccctgggtagatg

SEQ ID NO: 3222 - RNA, 99 nt, synthetic construct
  source 1..99: mol_type = other RNA
catcctggtggttgctgtggctgagaaggcggagaggagccctgtgacattcttcgacacgccccccatgctctttgtgttcattgccctggggaggtg

SEQ ID NO: 3223 - RNA, 99 nt, synthetic construct
  source 1..99: mol_type = other RNA
catcctggtggttgctgtggctgagaaggcggagaggagccctgtgacattcttcgacacgccccccatgctctttgtgttcattgccctgggtcggtg

SEQ ID NO: 3224 - RNA, 99 nt, synthetic construct
  source 1..99: mol_type = other RNA
catcctggtggttgctgtggctgagaaggcggagaggagccctgtgacattcttcgacacgccccccatgctctttgtgttcattgccctgggaaggtg

SEQ ID NO: 3225 - RNA, 99 nt, synthetic construct
  source 1..99: mol_type = other RNA
catcctggtggttgctgtggctgagaaggcggagaggagccctgtgacattcttcgacacgccccccatgctctttgtgttcattgccctgggcaggtg

SEQ ID NO: 3226 - RNA, 99 nt, synthetic construct
  source 1..99: mol_type = other RNA
catcctggtggttgctgtggctgagaaggcggagaggagccctgtgacattcttcgacacgccccccatgctctttgtgttcattgccctgggcagatg

SEQ ID NO: 3227 - RNA, 99 nt, synthetic construct
  source 1..99: mol_type = other RNA
catcctggtggttgctgtggctgagaaggcggagaggagccctgtgacattcttcgacacgccccccatgctctttgtgttcattgccctgggccggtg

SEQ ID NO: 3228 - RNA, 99 nt, synthetic construct
  source 1..99: mol_type = other RNA
catcctggtggttgctgtggctgagaaggcggagaggagccctgtgacattcttcgacacgccccccatgctctttgtgttcattgccctgggacggtg

SEQ ID NO: 3229 - RNA, 99 nt, synthetic construct
  source 1..99: mol_type = other RNA
catcctggtggttgctgtggctgagaaggcggagaggagccctgtgacattcttcgacacgccccccatgctctttgtgttcattgccctgggaagatg

SEQ ID NO: 3230 - RNA, 99 nt, synthetic construct
  source 1..99: mol_type = other RNA
catcctggtggttgctgtggctgagaaggcggagaggagccctgtgacattcttcgacacgccccccatgctctttgtgttcattgccctggggagatg

SEQ ID NO: 3231 - RNA, 99 nt, synthetic construct
  source 1..99: mol_type = other RNA
catcctggtggttgctgtggctgagaaggcggagaggagccctgtgacattcttcgacacgccccccatgctctttgtgttcattgccctggggcggtg

SEQ ID NO: 3232 - RNA, 100 nt, synthetic construct
  source 1..100: mol_type = other RNA
tcatcctggtggttgctgtggctgagaaggcggagaggagccctgtgacattcttcgacacgccccccatgctctttgtgttcattgccctgggcagatg

SEQ ID NO: 3233 - RNA, 100 nt, synthetic construct
  source 1..100: mol_type = other RNA
tcatcctggtggttgctgtggctgagaaggcggagaggagccctgtgacattcttcgacacgccccccatgctctttgtgttcattgccctgggacggtg

SEQ ID NO: 3234 - RNA, 100 nt, synthetic construct
  source 1..100: mol_type = other RNA
tcatcctggtggttgctgtggctgagaaggcggagaggagccctgtgacattcttcgacacgccccccatgctctttgtgttcattgccctgggaagatg

SEQ ID NO: 3235 - RNA, 100 nt, synthetic construct
  source 1..100: mol_type = other RNA
tcatcctggtggttgctgtggctgagaaggcggagaggagccctgtgacattcttcgacacgccccccatgctctttgtgttcattgccctggggagatg

SEQ ID NO: 3236 - RNA, 100 nt, synthetic construct
  source 1..100: mol_type = other RNA
tcatcctggtggttgctgtggctgagaaggcggagaggagccctgtgacattcttcgacacgccccccatgctctttgtgttcattgccctggggcggtg

SEQ ID NO: 3237 - RNA, 100 nt, synthetic construct
  source 1..100: mol_type = other RNA
tcatcctggtggttgctgtggctgagaaggcggagaggagccctgtgacattcttcgacacgccccccatgctctttgtgttcattgccctgggtaggtg

SEQ ID NO: 3238 - RNA, 100 nt, synthetic construct
  source 1..100: mol_type = other RNA
tcatcctggtggttgctgtggctgagaaggcggagaggagccctgtgacattcttcgacacgccccccatgctctttgtgttcattgccctggggaggtg

SEQ ID NO: 3239 - RNA, 100 nt, synthetic construct
  source 1..100: mol_type = other RNA
tcatcctggtggttgctgtggctgagaaggcggagaggagccctgtgacattcttcgacacgccccccatgctctttgtgttcattgccctgggcaggtg

SEQ ID NO: 3240 - RNA, 100 nt, synthetic construct
  source 1..100: mol_type = other RNA
tcatcctggtggttgctgtggctgagaaggcggagaggagccctgtgacattcttcgacacgccccccatgctctttgtgttcattgccctgggtcggtg

SEQ ID NO: 3241 - RNA, 100 nt, synthetic construct
  source 1..100: mol_type = other RNA
tcatcctggtggttgctgtggctgagaaggcggagaggagccctgtgacattcttcgacacgccccccatgctctttgtgttcattgccctgggtagatg

SEQ ID NO: 3242 - RNA, 100 nt, synthetic construct
  source 1..100: mol_type = other RNA
tcatcctggtggttgctgtggctgagaaggcggagaggagccctgtgacattcttcgacacgccccccatgctctttgtgttcattgccctgggccggtg

SEQ ID NO: 3243 - RNA, 100 nt, synthetic construct
  source 1..100: mol_type = other RNA
tcatcctggtggttgctgtggctgagaaggcggagaggagccctgtgacattcttcgacacgccccccatgctctttgtgttcattgccctgggaaggtg

SEQ ID NO: 3244 - RNA, 20 nt, synthetic construct
  source 1..20: mol_type = other RNA
ttattctctggtcatcctgg

SEQ ID NO: 3245 - RNA, 20 nt, synthetic construct
  source 1..20: mol_type = other RNA
tgttcattgccctgggcaga

SEQ ID NO: 3246 - RNA, 20 nt, synthetic construct
  source 1..20: mol_type = other RNA
cattgccctgggaagatggc

SEQ ID NO: 3247 - RNA, 20 nt, synthetic construct
  source 1..20: mol_type = other RNA
tgttcattgccctgggacgg

SEQ ID NO: 3248 - RNA, 20 nt, synthetic construct
  source 1..20: mol_type = other RNA
aggagccctgtgacattctt

SEQ ID NO: 3249 - RNA, 20 nt, synthetic construct
  source 1..20: mol_type = other RNA
tgttcattgccctggggagg

SEQ ID NO: 3250 - RNA, 20 nt, synthetic construct
  source 1..20: mol_type = other RNA
tgtgttcattgccctgggca

SEQ ID NO: 3251 - RNA, 20 nt, synthetic construct
  source 1..20: mol_type = other RNA
ggggaggtggctggaacact

SEQ ID NO: 3252 - RNA, 20 nt, synthetic construct
  source 1..20: mol_type = other RNA
gggcaggtggctggaacact

SEQ ID NO: 3253 - RNA, 20 nt, synthetic construct
  source 1..20: mol_type = other RNA
gggacggtggctggaacact

SEQ ID NO: 3254 - RNA, 20 nt, synthetic construct
  source 1..20: mol_type = other RNA
gggtaggtggctggaacact

SEQ ID NO: 3255 - RNA, 20 nt, synthetic construct
  source 1..20: mol_type = other RNA
gggtcggtggctggaacact

SEQ ID NO: 3256 - RNA, 20 nt, synthetic construct
  source 1..20: mol_type = other RNA
gggaaggtggctggaacact

SEQ ID NO: 3257 - RNA, 20 nt, synthetic construct
  source 1..20: mol_type = other RNA
tgttcattgccctgggaaga

SEQ ID NO: 3258 - RNA, 20 nt, synthetic construct
  source 1..20: mol_type = other RNA
tgttcattgccctgggtagg

SEQ ID NO: 3259 - RNA, 20 nt, synthetic construct
  source 1..20: mol_type = other RNA
attgccctgggcagatggct

SEQ ID NO: 3260 - RNA, 20 nt, synthetic construct
  source 1..20: mol_type = other RNA
ggtggttgctgtggctgaga

SEQ ID NO: 3261 - RNA, 20 nt, synthetic construct
  source 1..20: mol_type = other RNA
cattgccctgggtagatggc

SEQ ID NO: 3262 - RNA, 20 nt, synthetic construct
  source 1..20: mol_type = other RNA
ccctgtgacattcttcgaca

SEQ ID NO: 3263 - RNA, 20 nt, synthetic construct
  source 1..20: mol_type = other RNA
cctggtggttgctgtggctg

SEQ ID NO: 3264 - RNA, 20 nt, synthetic construct
  source 1..20: mol_type = other RNA
cattgccctggggcggtggc

SEQ ID NO: 3265 - RNA, 20 nt, synthetic construct
  source 1..20: mol_type = other RNA
ggggcggtggctggaacact

SEQ ID NO: 3266 - RNA, 20 nt, synthetic construct
  source 1..20: mol_type = other RNA
atcctggtggttgctgtggc

SEQ ID NO: 3267 - RNA, 20 nt, synthetic construct
  source 1..20: mol_type = other RNA
tgttcattgccctgggaagg

SEQ ID NO: 3268 - RNA, 20 nt, synthetic construct
  source 1..20: mol_type = other RNA
ctgtggctgagaaggcggag

SEQ ID NO: 3269 - RNA, 20 nt, synthetic construct
  source 1..20: mol_type = other RNA
ggttgctgtggctgagaagg

SEQ ID NO: 3270 - RNA, 20 nt, synthetic construct
  source 1..20: mol_type = other RNA
gtggttgctgtggctgagaa

SEQ ID NO: 3271 - RNA, 20 nt, synthetic construct
  source 1..20: mol_type = other RNA
cattgccctgggtcggtggc

SEQ ID NO: 3272 - RNA, 20 nt, synthetic construct
  source 1..20: mol_type = other RNA
tgttcattgccctgggtcgg

SEQ ID NO: 3273 - RNA, 20 nt, synthetic construct
  source 1..20: mol_type = other RNA
tctctggtcatcctggtggt

SEQ ID NO: 3274 - RNA, 20 nt, synthetic construct
  source 1..20: mol_type = other RNA
cattgccctggggaggtggc

SEQ ID NO: 3275 - RNA, 20 nt, synthetic construct
  source 1..20: mol_type = other RNA
tgtttattctctggtcatcc

SEQ ID NO: 3276 - RNA, 20 nt, synthetic construct
  source 1..20: mol_type = other RNA
attgccctgggcaggtggct

SEQ ID NO: 3277 - RNA, 20 nt, synthetic construct
  source 1..20: mol_type = other RNA
gaaggcggagaggagccctg

SEQ ID NO: 3278 - RNA, 20 nt, synthetic construct
  source 1..20: mol_type = other RNA
gtttattctctggtcatcct

SEQ ID NO: 3279 - RNA, 20 nt, synthetic construct
  source 1..20: mol_type = other RNA
ggtcatcctggtggttgctg

SEQ ID NO: 3280 - RNA, 20 nt, synthetic construct
  source 1..20: mol_type = other RNA
ctggtcatcctggtggttgc

SEQ ID NO: 3281 - RNA, 20 nt, synthetic construct
  source 1..20: mol_type = other RNA
cattgccctgggaaggtggc

SEQ ID NO: 3282 - RNA, 20 nt, synthetic construct
  source 1..20: mol_type = other RNA
tgctgtggctgagaaggcgg

SEQ ID NO: 3283 - RNA, 20 nt, synthetic construct
  source 1..20: mol_type = other RNA
tgtggctgagaaggcggaga

SEQ ID NO: 3284 - RNA, 20 nt, synthetic construct
  source 1..20: mol_type = other RNA
tgttcattgccctgggtaga

SEQ ID NO: 3285 - RNA, 20 nt, synthetic construct
  source 1..20: mol_type = other RNA
gttgctgtggctgagaaggc

SEQ ID NO: 3286 - RNA, 20 nt, synthetic construct
  source 1..20: mol_type = other RNA
cattgccctgggcaggtggc

SEQ ID NO: 3287 - RNA, 20 nt, synthetic construct
  source 1..20: mol_type = other RNA
tggctgagaaggcggagagg

SEQ ID NO: 3288 - RNA, 20 nt, synthetic construct
  source 1..20: mol_type = other RNA
tgttcattgccctgggcagg

SEQ ID NO: 3289 - RNA, 20 nt, synthetic construct
  source 1..20: mol_type = other RNA
gttcattgccctgggcagat

SEQ ID NO: 3290 - RNA, 20 nt, synthetic construct
  source 1..20: mol_type = other RNA
tgttcattgccctggggaga

SEQ ID NO: 3291 - RNA, 20 nt, synthetic construct
  source 1..20: mol_type = other RNA
gagaaggcggagaggagccc

SEQ ID NO: 3292 - RNA, 20 nt, synthetic construct
  source 1..20: mol_type = other RNA
gttcattgccctgggcaggt

SEQ ID NO: 3293 - RNA, 20 nt, synthetic construct
  source 1..20: mol_type = other RNA
tattctctggtcatcctggt

SEQ ID NO: 3294 - RNA, 20 nt, synthetic construct
  source 1..20: mol_type = other RNA
cattgccctgggtaggtggc

SEQ ID NO: 3295 - RNA, 20 nt, synthetic construct
  source 1..20: mol_type = other RNA
gtcatcctggtggttgctgt

SEQ ID NO: 3296 - RNA, 20 nt, synthetic construct
  source 1..20: mol_type = other RNA
cattgccctggggagatggc

SEQ ID NO: 3297 - RNA, 20 nt, synthetic construct
  source 1..20: mol_type = other RNA
cattgccctgggacggtggc

SEQ ID NO: 3298 - RNA, 20 nt, synthetic construct
  source 1..20: mol_type = other RNA
cattgccctgggcagatggc

SEQ ID NO: 3299 - RNA, 20 nt, synthetic construct
  source 1..20: mol_type = other RNA
tgttcattgccctggggcgg

SEQ ID NO: 3300 - RNA, 114 nt, synthetic construct
  source 1..114: mol_type = other RNA
ttgccaagtgttccagccacgttttagagctagaaatagcaagttaaaataaggctagtccgttatcaacttgaaaaagtggcaccgagtcggtgctgggtcggtggctggaac

SEQ ID NO: 3301 - RNA, 114 nt, synthetic construct
  source 1..114: mol_type = other RNA
ttgccaagtgttccagccacgttttagagctagaaatagcaagttaaaataaggctagtccgttatcaacttgaaaaagtggcaccgagtcggtgctgggccggtggctggaac

SEQ ID NO: 3302 - RNA, 114 nt, synthetic construct
  source 1..114: mol_type = other RNA
ttgccaagtgttccagccacgttttagagctagaaatagcaagttaaaataaggctagtccgttatcaacttgaaaaagtggcaccgagtcggtgctggggaggtggctggaac

SEQ ID NO: 3303 - RNA, 114 nt, synthetic construct
  source 1..114: mol_type = other RNA
ttgccaagtgttccagccacgttttagagctagaaatagcaagttaaaataaggctagtccgttatcaacttgaaaaagtggcaccgagtcggtgctgggaaggtggctggaac

SEQ ID NO: 3304 - RNA, 114 nt, synthetic construct
  source 1..114: mol_type = other RNA
ttgccaagtgttccagccacgttttagagctagaaatagcaagttaaaataaggctagtccgttatcaacttgaaaaagtggcaccgagtcggtgctgggtaggtggctggaac

SEQ ID NO: 3305 - RNA, 114 nt, synthetic construct
  source 1..114: mol_type = other RNA
ttgccaagtgttccagccacgttttagagctagaaatagcaagttaaaataaggctagtccgttatcaacttgaaaaagtggcaccgagtcggtgctggggcggtggctggaac

SEQ ID NO: 3306 - RNA, 114 nt, synthetic construct
  source 1..114: mol_type = other RNA
ttgccaagtgttccagccacgttttagagctagaaatagcaagttaaaataaggctagtccgttatcaacttgaaaaagtggcaccgagtcggtgctgggacggtggctggaac

SEQ ID NO: 3307 - RNA, 114 nt, synthetic construct
  source 1..114: mol_type = other RNA
ttgccaagtgttccagccacgttttagagctagaaatagcaagttaaaataaggctagtccgttatcaacttgaaaaagtggcaccgagtcggtgctgggcaggtggctggaac

SEQ ID NO: 3308 - RNA, 115 nt, synthetic construct
  source 1..115: mol_type = other RNA
ttgccaagtgttccagccacgttttagagctagaaatagcaagttaaaataaggctagtccgttatcaacttgaaaaagtggcaccgagtcggtgctgggtcggtggctggaaca

SEQ ID NO: 3309 - RNA, 115 nt, synthetic construct
  source 1..115: mol_type = other RNA
ttgccaagtgttccagccacgttttagagctagaaatagcaagttaaaataaggctagtccgttatcaacttgaaaaagtggcaccgagtcggtgctgggcaggtggctggaaca

SEQ ID NO: 3310 - RNA, 115 nt, synthetic construct
  source 1..115: mol_type = other RNA
ttgccaagtgttccagccacgttttagagctagaaatagcaagttaaaataaggctagtccgttatcaacttgaaaaagtggcaccgagtcggtgctgggaaggtggctggaaca

SEQ ID NO: 3311 - RNA, 115 nt, synthetic construct
  source 1..115: mol_type = other RNA
ttgccaagtgttccagccacgttttagagctagaaatagcaagttaaaataaggctagtccgttatcaacttgaaaaagtggcaccgagtcggtgctgggtaggtggctggaaca

SEQ ID NO: 3312 - RNA, 115 nt, synthetic construct
  source 1..115: mol_type = other RNA
ttgccaagtgttccagccacgttttagagctagaaatagcaagttaaaataaggctagtccgttatcaacttgaaaaagtggcaccgagtcggtgctgggacggtggctggaaca

SEQ ID NO: 3313 - RNA, 115 nt, synthetic construct
  source 1..115: mol_type = other RNA
ttgccaagtgttccagccacgttttagagctagaaatagcaagttaaaataaggctagtccgttatcaacttgaaaaagtggcaccgagtcggtgctggggaggtggctggaaca

SEQ ID NO: 3314 - RNA, 115 nt, synthetic construct
  source 1..115: mol_type = other RNA
ttgccaagtgttccagccacgttttagagctagaaatagcaagttaaaataaggctagtccgttatcaacttgaaaaagtggcaccgagtcggtgctggggcggtggctggaaca

SEQ ID NO: 3315 - RNA, 115 nt, synthetic construct
  source 1..115: mol_type = other RNA
ttgccaagtgttccagccacgttttagagctagaaatagcaagttaaaataaggctagtccgttatcaacttgaaaaagtggcaccgagtcggtgctgggccggtggctggaaca

SEQ ID NO: 3316 - RNA, 116 nt, synthetic construct
  source 1..116: mol_type = other RNA
ttgccaagtgttccagccacgttttagagctagaaatagcaagttaaaataaggctagtccgttatcaacttgaaaaagtggcaccgagtcggtgctggggaggtggctggaacac

SEQ ID NO: 3317 - RNA, 116 nt, synthetic construct
  source 1..116: mol_type = other RNA
ttgccaagtgttccagccacgttttagagctagaaatagcaagttaaaataaggctagtccgttatcaacttgaaaaagtggcaccgagtcggtgctgggtaggtggctggaacac

SEQ ID NO: 3318 - RNA, 116 nt, synthetic construct
  source 1..116: mol_type = other RNA
ttgccaagtgttccagccacgttttagagctagaaatagcaagttaaaataaggctagtccgttatcaacttgaaaaagtggcaccgagtcggtgctgggacggtggctggaacac

SEQ ID NO: 3319 - RNA, 116 nt, synthetic construct
  source 1..116: mol_type = other RNA
ttgccaagtgttccagccacgttttagagctagaaatagcaagttaaaataaggctagtccgttatcaacttgaaaaagtggcaccgagtcggtgctgggtcggtggctggaacac

SEQ ID NO: 3320 - RNA, 116 nt, synthetic construct
  source 1..116: mol_type = other RNA
ttgccaagtgttccagccacgttttagagctagaaatagcaagttaaaataaggctagtccgttatcaacttgaaaaagtggcaccgagtcggtgctgggccggtggctggaacac

SEQ ID NO: 3321 - RNA, 116 nt, synthetic construct
  source 1..116: mol_type = other RNA
ttgccaagtgttccagccacgttttagagctagaaatagcaagttaaaataaggctagtccgttatcaacttgaaaaagtggcaccgagtcggtgctgggaaggtggctggaacac

SEQ ID NO: 3322 - RNA, 116 nt, synthetic construct
  source 1..116: mol_type = other RNA
ttgccaagtgttccagccacgttttagagctagaaatagcaagttaaaataaggctagtccgttatcaacttgaaaaagtggcaccgagtcggtgctgggcaggtggctggaacac

SEQ ID NO: 3323 - RNA, 116 nt, synthetic construct
  source 1..116: mol_type = other RNA
ttgccaagtgttccagccacgttttagagctagaaatagcaagttaaaataaggctagtccgttatcaacttgaaaaagtggcaccgagtcggtgctggggcggtggctggaacac

SEQ ID NO: 3324 - RNA, 117 nt, synthetic construct
  source 1..117: mol_type = other RNA
ttgccaagtgttccagccacgttttagagctagaaatagcaagttaaaataaggctagtccgttatcaacttgaaaaagtggcaccgagtcggtgctgggtaggtggctggaacact

SEQ ID NO: 3325 - RNA, 117 nt, synthetic construct
  source 1..117: mol_type = other RNA
ttgccaagtgttccagccacgttttagagctagaaatagcaagttaaaataaggctagtccgttatcaacttgaaaaagtggcaccgagtcggtgctgggaaggtggctggaacact

SEQ ID NO: 3326 - RNA, 117 nt, synthetic construct
  source 1..117: mol_type = other RNA
ttgccaagtgttccagccacgttttagagctagaaatagcaagttaaaataaggctagtccgttatcaacttgaaaaagtggcaccgagtcggtgctgggccggtggctggaacact

SEQ ID NO: 3327 - RNA, 117 nt, synthetic construct
  source 1..117: mol_type = other RNA
ttgccaagtgttccagccacgttttagagctagaaatagcaagttaaaataaggctagtccgttatcaacttgaaaaagtggcaccgagtcggtgctgggtcggtggctggaacact

SEQ ID NO: 3328 - RNA, 117 nt, synthetic construct
  source 1..117: mol_type = other RNA
ttgccaagtgttccagccacgttttagagctagaaatagcaagttaaaataaggctagtccgttatcaacttgaaaaagtggcaccgagtcggtgctgggacggtggctggaacact

SEQ ID NO: 3329 - RNA, 117 nt, synthetic construct
  source 1..117: mol_type = other RNA
ttgccaagtgttccagccacgttttagagctagaaatagcaagttaaaataaggctagtccgttatcaacttgaaaaagtggcaccgagtcggtgctggggcggtggctggaacact

SEQ ID NO: 3330 - RNA, 117 nt, synthetic construct
  source 1..117: mol_type = other RNA
ttgccaagtgttccagccacgttttagagctagaaatagcaagttaaaataaggctagtccgttatcaacttgaaaaagtggcaccgagtcggtgctgggcaggtggctggaacact

SEQ ID NO: 3331 - RNA, 117 nt, synthetic construct
  source 1..117: mol_type = other RNA
ttgccaagtgttccagccacgttttagagctagaaatagcaagttaaaataaggctagtccgttatcaacttgaaaaagtggcaccgagtcggtgctggggaggtggctggaacact

SEQ ID NO: 3332 - RNA, 118 nt, synthetic construct
  source 1..118: mol_type = other RNA
ttgccaagtgttccagccacgttttagagctagaaatagcaagttaaaataaggctagtccgttatcaacttgaaaaagtggcaccgagtcggtgctgggccggtggctggaacactt

SEQ ID NO: 3333 - RNA, 118 nt, synthetic construct
  source 1..118: mol_type = other RNA
ttgccaagtgttccagccacgttttagagctagaaatagcaagttaaaataaggctagtccgttatcaacttgaaaaagtggcaccgagtcggtgcgccctgggtcggtggctggaac

SEQ ID NO: 3334 - RNA, 118 nt, synthetic construct
  source 1..118: mol_type = other RNA
ttgccaagtgttccagccacgttttagagctagaaatagcaagttaaaataaggctagtccgttatcaacttgaaaaagtggcaccgagtcggtgcgccctgggccggtggctggaac

SEQ ID NO: 3335 - RNA, 118 nt, synthetic construct
  source 1..118: mol_type = other RNA
ttgccaagtgttccagccacgttttagagctagaaatagcaagttaaaataaggctagtccgttatcaacttgaaaaagtggcaccgagtcggtgctggggaggtggctggaacactt

SEQ ID NO: 3336 - RNA, 118 nt, synthetic construct
  source 1..118: mol_type = other RNA
ttgccaagtgttccagccacgttttagagctagaaatagcaagttaaaataaggctagtccgttatcaacttgaaaaagtggcaccgagtcggtgctgggaaggtggctggaacactt

SEQ ID NO: 3337 - RNA, 118 nt, synthetic construct
  source 1..118: mol_type = other RNA
ttgccaagtgttccagccacgttttagagctagaaatagcaagttaaaataaggctagtccgttatcaacttgaaaaagtggcaccgagtcggtgctgggtcggtggctggaacactt

SEQ ID NO: 3338 - RNA, 118 nt, synthetic construct
  source 1..118: mol_type = other RNA
ttgccaagtgttccagccacgttttagagctagaaatagcaagttaaaataaggctagtccgttatcaacttgaaaaagtggcaccgagtcggtgctgggtaggtggctggaacactt

SEQ ID NO: 3339 - RNA, 118 nt, synthetic construct
  source 1..118: mol_type = other RNA
ttgccaagtgttccagccacgttttagagctagaaatagcaagttaaaataaggctagtccgttatcaacttgaaaaagtggcaccgagtcggtgctggggcggtggctggaacactt

SEQ ID NO: 3340 - RNA, 118 nt, synthetic construct
  source 1..118: mol_type = other RNA
ttgccaagtgttccagccacgttttagagctagaaatagcaagttaaaataaggctagtccgttatcaacttgaaaaagtggcaccgagtcggtgcgccctgggtaggtggctggaac

SEQ ID NO: 3341 - RNA, 118 nt, synthetic construct
  source 1..118: mol_type = other RNA
ttgccaagtgttccagccacgttttagagctagaaatagcaagttaaaataaggctagtccgttatcaacttgaaaaagtggcaccgagtcggtgcgccctggggcggtggctggaac

SEQ ID NO: 3342 - RNA, 118 nt, synthetic construct
  source 1..118: mol_type = other RNA
ttgccaagtgttccagccacgttttagagctagaaatagcaagttaaaataaggctagtccgttatcaacttgaaaaagtggcaccgagtcggtgctgggacggtggctggaacactt

SEQ ID NO: 3343 - RNA, 118 nt, synthetic construct
  source 1..118: mol_type = other RNA
ttgccaagtgttccagccacgttttagagctagaaatagcaagttaaaataaggctagtccgttatcaacttgaaaaagtggcaccgagtcggtgcgccctgggacggtggctggaac

SEQ ID NO: 3344 - RNA, 118 nt, synthetic construct
  source 1..118: mol_type = other RNA
ttgccaagtgttccagccacgttttagagctagaaatagcaagttaaaataaggctagtccgttatcaacttgaaaaagtggcaccgagtcggtgctgggcaggtggctggaacactt

SEQ ID NO: 3345 - RNA, 118 nt, synthetic construct
  source 1..118: mol_type = other RNA
ttgccaagtgttccagccacgttttagagctagaaatagcaagttaaaataaggctagtccgttatcaacttgaaaaagtggcaccgagtcggtgcgccctggggaggtggctggaac

SEQ ID NO: 3346 - RNA, 118 nt, synthetic construct
  source 1..118: mol_type = other RNA
ttgccaagtgttccagccacgttttagagctagaaatagcaagttaaaataaggctagtccgttatcaacttgaaaaagtggcaccgagtcggtgcgccctgggcaggtggctggaac

SEQ ID NO: 3347 - RNA, 118 nt, synthetic construct
  source 1..118: mol_type = other RNA
ttgccaagtgttccagccacgttttagagctagaaatagcaagttaaaataaggctagtccgttatcaacttgaaaaagtggcaccgagtcggtgcgccctgggaaggtggctggaac

SEQ ID NO: 3348 - RNA, 119 nt, synthetic construct
  source 1..119: mol_type = other RNA
ttgccaagtgttccagccacgttttagagctagaaatagcaagttaaaataaggctagtccgttatcaacttgaaaaagtggcaccgagtcggtgcgccctgggacggtggctggaaca

SEQ ID NO: 3349 - RNA, 119 nt, synthetic construct
  source 1..119: mol_type = other RNA
ttgccaagtgttccagccacgttttagagctagaaatagcaagttaaaataaggctagtccgttatcaacttgaaaaagtggcaccgagtcggtgctgggccggtggctggaacacttg

SEQ ID NO: 3350 - RNA, 119 nt, synthetic construct
  source 1..119: mol_type = other RNA
ttgccaagtgttccagccacgttttagagctagaaatagcaagttaaaataaggctagtccgttatcaacttgaaaaagtggcaccgagtcggtgcgccctgggtaggtggctggaaca

SEQ ID NO: 3351 - RNA, 119 nt, synthetic construct
  source 1..119: mol_type = other RNA
ttgccaagtgttccagccacgttttagagctagaaatagcaagttaaaataaggctagtccgttatcaacttgaaaaagtggcaccgagtcggtgctgggtcggtggctggaacacttg

SEQ ID NO: 3352 - RNA, 119 nt, synthetic construct
  source 1..119: mol_type = other RNA
ttgccaagtgttccagccacgttttagagctagaaatagcaagttaaaataaggctagtccgttatcaacttgaaaaagtggcaccgagtcggtgcgccctgggtcggtggctggaaca

SEQ ID NO: 3353 - RNA, 119 nt, synthetic construct
  source 1..119: mol_type = other RNA
ttgccaagtgttccagccacgttttagagctagaaatagcaagttaaaataaggctagtccgttatcaacttgaaaaagtggcaccgagtcggtgctgccctgggcaggtggctggaac

SEQ ID NO: 3354 - RNA, 119 nt, synthetic construct
  source 1..119: mol_type = other RNA
ttgccaagtgttccagccacgttttagagctagaaatagcaagttaaaataaggctagtccgttatcaacttgaaaaagtggcaccgagtcggtgctgccctgggtcggtggctggaac

SEQ ID NO: 3355 - RNA, 119 nt, synthetic construct
  source 1..119: mol_type = other RNA
ttgccaagtgttccagccacgttttagagctagaaatagcaagttaaaataaggctagtccgttatcaacttgaaaaagtggcaccgagtcggtgctgggtaggtggctggaacacttg

SEQ ID NO: 3356 - RNA, 119 nt, synthetic construct
  source 1..119: mol_type = other RNA
ttgccaagtgttccagccacgttttagagctagaaatagcaagttaaaataaggctagtccgttatcaacttgaaaaagtggcaccgagtcggtgctgggaaggtggctggaacacttg

SEQ ID NO: 3357 - RNA, 119 nt, synthetic construct
  source 1..119: mol_type = other RNA
ttgccaagtgttccagccacgttttagagctagaaatagcaagttaaaataaggctagtccgttatcaacttgaaaaagtggcaccgagtcggtgctgccctgggaaggtggctggaac

SEQ ID NO: 3358 - RNA, 119 nt, synthetic construct
  source 1..119: mol_type = other RNA
ttgccaagtgttccagccacgttttagagctagaaatagcaagttaaaataaggctagtccgttatcaacttgaaaaagtggcaccgagtcggtgctgccctgggacggtggctggaac

SEQ ID NO: 3359 - RNA, 119 nt, synthetic construct
  source 1..119: mol_type = other RNA
ttgccaagtgttccagccacgttttagagctagaaatagcaagttaaaataaggctagtccgttatcaacttgaaaaagtggcaccgagtcggtgcgccctgggccggtggctggaaca

SEQ ID NO: 3360 - RNA, 119 nt, synthetic construct
  source 1..119: mol_type = other RNA
ttgccaagtgttccagccacgttttagagctagaaatagcaagttaaaataaggctagtccgttatcaacttgaaaaagtggcaccgagtcggtgcgccctggggaggtggctggaaca

SEQ ID NO: 3361 - RNA, 119 nt, synthetic construct
  source 1..119: mol_type = other RNA
ttgccaagtgttccagccacgttttagagctagaaatagcaagttaaaataaggctagtccgttatcaacttgaaaaagtggcaccgagtcggtgctggggaggtggctggaacacttg

SEQ ID NO: 3362 - RNA, 119 nt, synthetic construct
  source 1..119: mol_type = other RNA
ttgccaagtgttccagccacgttttagagctagaaatagcaagttaaaataaggctagtccgttatcaacttgaaaaagtggcaccgagtcggtgctgccctgggccggtggctggaac

SEQ ID NO: 3363 - RNA, 119 nt, synthetic construct
  source 1..119: mol_type = other RNA
ttgccaagtgttccagccacgttttagagctagaaatagcaagttaaaataaggctagtccgttatcaacttgaaaaagtggcaccgagtcggtgcgccctgggaaggtggctggaaca

SEQ ID NO: 3364 - RNA, 119 nt, synthetic construct
  source 1..119: mol_type = other RNA
ttgccaagtgttccagccacgttttagagctagaaatagcaagttaaaataaggctagtccgttatcaacttgaaaaagtggcaccgagtcggtgctgggcaggtggctggaacacttg

SEQ ID NO: 3365 - RNA, 119 nt, synthetic construct
  source 1..119: mol_type = other RNA
ttgccaagtgttccagccacgttttagagctagaaatagcaagttaaaataaggctagtccgttatcaacttgaaaaagtggcaccgagtcggtgctgccctggggcggtggctggaac

SEQ ID NO: 3366 - RNA, 119 nt, synthetic construct
  source 1..119: mol_type = other RNA
ttgccaagtgttccagccacgttttagagctagaaatagcaagttaaaataaggctagtccgttatcaacttgaaaaagtggcaccgagtcggtgcgccctggggcggtggctggaaca

SEQ ID NO: 3367 - RNA, 119 nt, synthetic construct
  source 1..119: mol_type = other RNA
ttgccaagtgttccagccacgttttagagctagaaatagcaagttaaaataaggctagtccgttatcaacttgaaaaagtggcaccgagtcggtgctgccctggggaggtggctggaac

SEQ ID NO: 3368 - RNA, 119 nt, synthetic construct
  source 1..119: mol_type = other RNA
ttgccaagtgttccagccacgttttagagctagaaatagcaagttaaaataaggctagtccgttatcaacttgaaaaagtggcaccgagtcggtgcgccctgggcaggtggctggaaca

SEQ ID NO: 3369 - RNA, 119 nt, synthetic construct
  source 1..119: mol_type = other RNA
ttgccaagtgttccagccacgttttagagctagaaatagcaagttaaaataaggctagtccgttatcaacttgaaaaagtggcaccgagtcggtgctggggcggtggctggaacacttg

SEQ ID NO: 3370 - RNA, 119 nt, synthetic construct
  source 1..119: mol_type = other RNA
ttgccaagtgttccagccacgttttagagctagaaatagcaagttaaaataaggctagtccgttatcaacttgaaaaagtggcaccgagtcggtgctgccctgggtaggtggctggaac

SEQ ID NO: 3371 - RNA, 119 nt, synthetic construct
  source 1..119: mol_type = other RNA
ttgccaagtgttccagccacgttttagagctagaaatagcaagttaaaataaggctagtccgttatcaacttgaaaaagtggcaccgagtcggtgctgggacggtggctggaacacttg

SEQ ID NO: 3372 - RNA, 120 nt, synthetic construct
  source 1..120: mol_type = other RNA
ttgccaagtgttccagccacgttttagagctagaaatagcaagttaaaataaggctagtccgttatcaacttgaaaaagtggcaccgagtcggtgcttgccctgggtaggtggctggaac

SEQ ID NO: 3373 - RNA, 120 nt, synthetic construct
  source 1..120: mol_type = other RNA
ttgccaagtgttccagccacgttttagagctagaaatagcaagttaaaataaggctagtccgttatcaacttgaaaaagtggcaccgagtcggtgcttgccctggggcggtggctggaac

SEQ ID NO: 3374 - RNA, 120 nt, synthetic construct
  source 1..120: mol_type = other RNA
ttgccaagtgttccagccacgttttagagctagaaatagcaagttaaaataaggctagtccgttatcaacttgaaaaagtggcaccgagtcggtgctgggaaggtggctggaacacttgg

SEQ ID NO: 3375 - RNA, 120 nt, synthetic construct
  source 1..120: mol_type = other RNA
ttgccaagtgttccagccacgttttagagctagaaatagcaagttaaaataaggctagtccgttatcaacttgaaaaagtggcaccgagtcggtgcttgccctgggcaggtggctggaac

SEQ ID NO: 3376 - RNA, 120 nt, synthetic construct
  source 1..120: mol_type = other RNA
ttgccaagtgttccagccacgttttagagctagaaatagcaagttaaaataaggctagtccgttatcaacttgaaaaagtggcaccgagtcggtgcttgccctgggacggtggctggaac

SEQ ID NO: 3377 - RNA, 120 nt, synthetic construct
  source 1..120: mol_type = other RNA
ttgccaagtgttccagccacgttttagagctagaaatagcaagttaaaataaggctagtccgttatcaacttgaaaaagtggcaccgagtcggtgctgccctgggacggtggctggaaca

SEQ ID NO: 3378 - RNA, 120 nt, synthetic construct
  source 1..120: mol_type = other RNA
ttgccaagtgttccagccacgttttagagctagaaatagcaagttaaaataaggctagtccgttatcaacttgaaaaagtggcaccgagtcggtgctgccctgggcaggtggctggaaca

SEQ ID NO: 3379 - RNA, 120 nt, synthetic construct
  source 1..120: mol_type = other RNA
ttgccaagtgttccagccacgttttagagctagaaatagcaagttaaaataaggctagtccgttatcaacttgaaaaagtggcaccgagtcggtgctgggtaggtggctggaacacttgg

SEQ ID NO: 3380 - RNA, 120 nt, synthetic construct
  source 1..120: mol_type = other RNA
ttgccaagtgttccagccacgttttagagctagaaatagcaagttaaaataaggctagtccgttatcaacttgaaaaagtggcaccgagtcggtgctgggtcggtggctggaacacttgg

SEQ ID NO: 3381 - RNA, 120 nt, synthetic construct
  source 1..120: mol_type = other RNA
ttgccaagtgttccagccacgttttagagctagaaatagcaagttaaaataaggctagtccgttatcaacttgaaaaagtggcaccgagtcggtgcttgccctgggaaggtggctggaac

SEQ ID NO: 3382 - RNA, 120 nt, synthetic construct
  source 1..120: mol_type = other RNA
ttgccaagtgttccagccacgttttagagctagaaatagcaagttaaaataaggctagtccgttatcaacttgaaaaagtggcaccgagtcggtgctgccctgggccggtggctggaaca

SEQ ID NO: 3383 - RNA, 120 nt, synthetic construct
  source 1..120: mol_type = other RNA
ttgccaagtgttccagccacgttttagagctagaaatagcaagttaaaataaggctagtccgttatcaacttgaaaaagtggcaccgagtcggtgctggggaggtggctggaacacttgg

SEQ ID NO: 3384 - RNA, 120 nt, synthetic construct
  source 1..120: mol_type = other RNA
ttgccaagtgttccagccacgttttagagctagaaatagcaagttaaaataaggctagtccgttatcaacttgaaaaagtggcaccgagtcggtgcgccctgggaaggtggctggaacac

SEQ ID NO: 3385 - RNA, 120 nt, synthetic construct
  source 1..120: mol_type = other RNA
ttgccaagtgttccagccacgttttagagctagaaatagcaagttaaaataaggctagtccgttatcaacttgaaaaagtggcaccgagtcggtgcgccctggggcggtggctggaacac

SEQ ID NO: 3386 - RNA, 120 nt, synthetic construct
  source 1..120: mol_type = other RNA
ttgccaagtgttccagccacgttttagagctagaaatagcaagttaaaataaggctagtccgttatcaacttgaaaaagtggcaccgagtcggtgcgccctggggaggtggctggaacac

SEQ ID NO: 3387 - RNA, 120 nt, synthetic construct
  source 1..120: mol_type = other RNA
ttgccaagtgttccagccacgttttagagctagaaatagcaagttaaaataaggctagtccgttatcaacttgaaaaagtggcaccgagtcggtgctgccctggggcggtggctggaaca

SEQ ID NO: 3388 - RNA, 120 nt, synthetic construct
  source 1..120: mol_type = other RNA
ttgccaagtgttccagccacgttttagagctagaaatagcaagttaaaataaggctagtccgttatcaacttgaaaaagtggcaccgagtcggtgcgccctgggacggtggctggaacac

SEQ ID NO: 3389 - RNA, 120 nt, synthetic construct
  source 1..120: mol_type = other RNA
ttgccaagtgttccagccacgttttagagctagaaatagcaagttaaaataaggctagtccgttatcaacttgaaaaagtggcaccgagtcggtgcgccctgggcaggtggctggaacac

SEQ ID NO: 3390 - RNA, 120 nt, synthetic construct
  source 1..120: mol_type = other RNA
ttgccaagtgttccagccacgttttagagctagaaatagcaagttaaaataaggctagtccgttatcaacttgaaaaagtggcaccgagtcggtgcttgccctgggtcggtggctggaac

SEQ ID NO: 3391 - RNA, 120 nt, synthetic construct
  source 1..120: mol_type = other RNA
ttgccaagtgttccagccacgttttagagctagaaatagcaagttaaaataaggctagtccgttatcaacttgaaaaagtggcaccgagtcggtgctgccctgggaaggtggctggaaca

SEQ ID NO: 3392 - RNA, 120 nt, synthetic construct
  source 1..120: mol_type = other RNA
ttgccaagtgttccagccacgttttagagctagaaatagcaagttaaaataaggctagtccgttatcaacttgaaaaagtggcaccgagtcggtgctgggccggtggctggaacacttgg

SEQ ID NO: 3393 - RNA, 120 nt, synthetic construct
  source 1..120: mol_type = other RNA
ttgccaagtgttccagccacgttttagagctagaaatagcaagttaaaataaggctagtccgttatcaacttgaaaaagtggcaccgagtcggtgcttgccctgggccggtggctggaac

SEQ ID NO: 3394 - RNA, 120 nt, synthetic construct
  source 1..120: mol_type = other RNA
ttgccaagtgttccagccacgttttagagctagaaatagcaagttaaaataaggctagtccgttatcaacttgaaaaagtggcaccgagtcggtgcttgccctggggaggtggctggaac

SEQ ID NO: 3395 - RNA, 120 nt, synthetic construct
  source 1..120: mol_type = other RNA
ttgccaagtgttccagccacgttttagagctagaaatagcaagttaaaataaggctagtccgttatcaacttgaaaaagtggcaccgagtcggtgctgccctgggtcggtggctggaaca

SEQ ID NO: 3396 - RNA, 120 nt, synthetic construct
  source 1..120: mol_type = other RNA
ttgccaagtgttccagccacgttttagagctagaaatagcaagttaaaataaggctagtccgttatcaacttgaaaaagtggcaccgagtcggtgcgccctgggccggtggctggaacac

SEQ ID NO: 3397 - RNA, 120 nt, synthetic construct
  source 1..120: mol_type = other RNA
ttgccaagtgttccagccacgttttagagctagaaatagcaagttaaaataaggctagtccgttatcaacttgaaaaagtggcaccgagtcggtgctgccctggggaggtggctggaaca

SEQ ID NO: 3398 - RNA, 120 nt, synthetic construct
  source 1..120: mol_type = other RNA
ttgccaagtgttccagccacgttttagagctagaaatagcaagttaaaataaggctagtccgttatcaacttgaaaaagtggcaccgagtcggtgcgccctgggtcggtggctggaacac

SEQ ID NO: 3399 - RNA, 120 nt, synthetic construct
  source 1..120: mol_type = other RNA
ttgccaagtgttccagccacgttttagagctagaaatagcaagttaaaataaggctagtccgttatcaacttgaaaaagtggcaccgagtcggtgctggggcggtggctggaacacttgg

SEQ ID NO: 3400 - RNA, 120 nt, synthetic construct
  source 1..120: mol_type = other RNA
ttgccaagtgttccagccacgttttagagctagaaatagcaagttaaaataaggctagtccgttatcaacttgaaaaagtggcaccgagtcggtgctgggcaggtggctggaacacttgg

SEQ ID NO: 3401 - RNA, 120 nt, synthetic construct
  source 1..120: mol_type = other RNA
ttgccaagtgttccagccacgttttagagctagaaatagcaagttaaaataaggctagtccgttatcaacttgaaaaagtggcaccgagtcggtgctgggacggtggctggaacacttgg

SEQ ID NO: 3402 - RNA, 120 nt, synthetic construct
  source 1..120: mol_type = other RNA
ttgccaagtgttccagccacgttttagagctagaaatagcaagttaaaataaggctagtccgttatcaacttgaaaaagtggcaccgagtcggtgctgccctgggtaggtggctggaaca

SEQ ID NO: 3403 - RNA, 120 nt, synthetic construct
  source 1..120: mol_type = other RNA
ttgccaagtgttccagccacgttttagagctagaaatagcaagttaaaataaggctagtccgttatcaacttgaaaaagtggcaccgagtcggtgcgccctgggtaggtggctggaacac

SEQ ID NO: 3404 - RNA, 121 nt, synthetic construct
  source 1..121: mol_type = other RNA
ttgccaagtgttccagccacgttttagagctagaaatagcaagttaaaataaggctagtccgttatcaacttgaaaaagtggcaccgagtcggtgcgccctgggcaggtggctggaacact

SEQ ID NO: 3405 - RNA, 121 nt, synthetic construct
  source 1..121: mol_type = other RNA
ttgccaagtgttccagccacgttttagagctagaaatagcaagttaaaataaggctagtccgttatcaacttgaaaaagtggcaccgagtcggtgctgccctgggtaggtggctggaacac

SEQ ID NO: 3406 - RNA, 121 nt, synthetic construct
  source 1..121: mol_type = other RNA
ttgccaagtgttccagccacgttttagagctagaaatagcaagttaaaataaggctagtccgttatcaacttgaaaaagtggcaccgagtcggtgctgccctgggcaggtggctggaacac

SEQ ID NO: 3407 - RNA, 121 nt, synthetic construct
  source 1..121: mol_type = other RNA
ttgccaagtgttccagccacgttttagagctagaaatagcaagttaaaataaggctagtccgttatcaacttgaaaaagtggcaccgagtcggtgcttgccctgggtaggtggctggaaca

SEQ ID NO: 3408 - RNA, 121 nt, synthetic construct
  source 1..121: mol_type = other RNA
ttgccaagtgttccagccacgttttagagctagaaatagcaagttaaaataaggctagtccgttatcaacttgaaaaagtggcaccgagtcggtgctgccctggggaggtggctggaacac

SEQ ID NO: 3409 - RNA, 121 nt, synthetic construct
  source 1..121: mol_type = other RNA
ttgccaagtgttccagccacgttttagagctagaaatagcaagttaaaataaggctagtccgttatcaacttgaaaaagtggcaccgagtcggtgcttgccctgggccggtggctggaaca

SEQ ID NO: 3410 - RNA, 121 nt, synthetic construct
  source 1..121: mol_type = other RNA
ttgccaagtgttccagccacgttttagagctagaaatagcaagttaaaataaggctagtccgttatcaacttgaaaaagtggcaccgagtcggtgcattgccctgggtcggtggctggaac

SEQ ID NO: 3411 - RNA, 121 nt, synthetic construct
  source 1..121: mol_type = other RNA
ttgccaagtgttccagccacgttttagagctagaaatagcaagttaaaataaggctagtccgttatcaacttgaaaaagtggcaccgagtcggtgcttgccctgggcaggtggctggaaca

SEQ ID NO: 3412 - RNA, 121 nt, synthetic construct
  source 1..121: mol_type = other RNA
ttgccaagtgttccagccacgttttagagctagaaatagcaagttaaaataaggctagtccgttatcaacttgaaaaagtggcaccgagtcggtgcgccctgggtaggtggctggaacact

SEQ ID NO: 3413 - RNA, 121 nt, synthetic construct
  source 1..121: mol_type = other RNA
ttgccaagtgttccagccacgttttagagctagaaatagcaagttaaaataaggctagtccgttatcaacttgaaaaagtggcaccgagtcggtgctgccctgggtcggtggctggaacac

SEQ ID NO: 3414 - RNA, 121 nt, synthetic construct
  source 1..121: mol_type = other RNA
ttgccaagtgttccagccacgttttagagctagaaatagcaagttaaaataaggctagtccgttatcaacttgaaaaagtggcaccgagtcggtgcttgccctggggaggtggctggaaca

SEQ ID NO: 3415 - RNA, 121 nt, synthetic construct
  source 1..121: mol_type = other RNA
ttgccaagtgttccagccacgttttagagctagaaatagcaagttaaaataaggctagtccgttatcaacttgaaaaagtggcaccgagtcggtgcttgccctggggcggtggctggaaca

SEQ ID NO: 3416 - RNA, 121 nt, synthetic construct
  source 1..121: mol_type = other RNA
ttgccaagtgttccagccacgttttagagctagaaatagcaagttaaaataaggctagtccgttatcaacttgaaaaagtggcaccgagtcggtgcattgccctgggtaggtggctggaac

SEQ ID NO: 3417 - RNA, 121 nt, synthetic construct
  source 1..121: mol_type = other RNA
ttgccaagtgttccagccacgttttagagctagaaatagcaagttaaaataaggctagtccgttatcaacttgaaaaagtggcaccgagtcggtgcgccctggggaggtggctggaacact

SEQ ID NO: 3418 - RNA, 121 nt, synthetic construct
  source 1..121: mol_type = other RNA
ttgccaagtgttccagccacgttttagagctagaaatagcaagttaaaataaggctagtccgttatcaacttgaaaaagtggcaccgagtcggtgctgccctgggacggtggctggaacac

SEQ ID NO: 3419 - RNA, 121 nt, synthetic construct
  source 1..121: mol_type = other RNA
ttgccaagtgttccagccacgttttagagctagaaatagcaagttaaaataaggctagtccgttatcaacttgaaaaagtggcaccgagtcggtgcttgccctgggaaggtggctggaaca

SEQ ID NO: 3420 - RNA, 121 nt, synthetic construct
  source 1..121: mol_type = other RNA
ttgccaagtgttccagccacgttttagagctagaaatagcaagttaaaataaggctagtccgttatcaacttgaaaaagtggcaccgagtcggtgcgccctgggtcggtggctggaacact

SEQ ID NO: 3421 - RNA, 121 nt, synthetic construct
  source 1..121: mol_type = other RNA
ttgccaagtgttccagccacgttttagagctagaaatagcaagttaaaataaggctagtccgttatcaacttgaaaaagtggcaccgagtcggtgcattgccctgggacggtggctggaac

SEQ ID NO: 3422 - RNA, 121 nt, synthetic construct
  source 1..121: mol_type = other RNA
ttgccaagtgttccagccacgttttagagctagaaatagcaagttaaaataaggctagtccgttatcaacttgaaaaagtggcaccgagtcggtgcgccctgggacggtggctggaacact

SEQ ID NO: 3423 - RNA, 121 nt, synthetic construct
  source 1..121: mol_type = other RNA
ttgccaagtgttccagccacgttttagagctagaaatagcaagttaaaataaggctagtccgttatcaacttgaaaaagtggcaccgagtcggtgcgccctggggcggtggctggaacact

SEQ ID NO: 3424 - RNA, 121 nt, synthetic construct
  source 1..121: mol_type = other RNA
ttgccaagtgttccagccacgttttagagctagaaatagcaagttaaaataaggctagtccgttatcaacttgaaaaagtggcaccgagtcggtgcattgccctggggcggtggctggaac

SEQ ID NO: 3425 - RNA, 121 nt, synthetic construct
  source 1..121: mol_type = other RNA
ttgccaagtgttccagccacgttttagagctagaaatagcaagttaaaataaggctagtccgttatcaacttgaaaaagtggcaccgagtcggtgcttgccctgggtcggtggctggaaca

SEQ ID NO: 3426 - RNA, 121 nt, synthetic construct
  source 1..121: mol_type = other RNA
ttgccaagtgttccagccacgttttagagctagaaatagcaagttaaaataaggctagtccgttatcaacttgaaaaagtggcaccgagtcggtgctgccctggggcggtggctggaacac

SEQ ID NO: 3427 - RNA, 121 nt, synthetic construct
  source 1..121: mol_type = other RNA
ttgccaagtgttccagccacgttttagagctagaaatagcaagttaaaataaggctagtccgttatcaacttgaaaaagtggcaccgagtcggtgcttgccctgggacggtggctggaaca

SEQ ID NO: 3428 - RNA, 121 nt, synthetic construct
  source 1..121: mol_type = other RNA
ttgccaagtgttccagccacgttttagagctagaaatagcaagttaaaataaggctagtccgttatcaacttgaaaaagtggcaccgagtcggtgcattgccctgggcaggtggctggaac

SEQ ID NO: 3429 - RNA, 121 nt, synthetic construct
  source 1..121: mol_type = other RNA
ttgccaagtgttccagccacgttttagagctagaaatagcaagttaaaataaggctagtccgttatcaacttgaaaaagtggcaccgagtcggtgcattgccctgggccggtggctggaac

SEQ ID NO: 3430 - RNA, 121 nt, synthetic construct
  source 1..121: mol_type = other RNA
ttgccaagtgttccagccacgttttagagctagaaatagcaagttaaaataaggctagtccgttatcaacttgaaaaagtggcaccgagtcggtgcgccctgggaaggtggctggaacact

SEQ ID NO: 3431 - RNA, 121 nt, synthetic construct
  source 1..121: mol_type = other RNA
ttgccaagtgttccagccacgttttagagctagaaatagcaagttaaaataaggctagtccgttatcaacttgaaaaagtggcaccgagtcggtgctgccctgggaaggtggctggaacac

SEQ ID NO: 3432 - RNA, 121 nt, synthetic construct
  source 1..121: mol_type = other RNA
ttgccaagtgttccagccacgttttagagctagaaatagcaagttaaaataaggctagtccgttatcaacttgaaaaagtggcaccgagtcggtgcattgccctggggaggtggctggaac

SEQ ID NO: 3433 - RNA, 121 nt, synthetic construct
  source 1..121: mol_type = other RNA
ttgccaagtgttccagccacgttttagagctagaaatagcaagttaaaataaggctagtccgttatcaacttgaaaaagtggcaccgagtcggtgcgccctgggccggtggctggaacact

SEQ ID NO: 3434 - RNA, 121 nt, synthetic construct
  source 1..121: mol_type = other RNA
ttgccaagtgttccagccacgttttagagctagaaatagcaagttaaaataaggctagtccgttatcaacttgaaaaagtggcaccgagtcggtgcattgccctgggaaggtggctggaac

SEQ ID NO: 3435 - RNA, 121 nt, synthetic construct
  source 1..121: mol_type = other RNA
ttgccaagtgttccagccacgttttagagctagaaatagcaagttaaaataaggctagtccgttatcaacttgaaaaagtggcaccgagtcggtgctgccctgggccggtggctggaacac

SEQ ID NO: 3436 - RNA, 122 nt, synthetic construct
  source 1..122: mol_type = other RNA
gttgccaagtgttccagccacgttttagagctagaaatagcaagttaaaataaggctagtccgttatcaacttgaaaaagtggcaccgagtcggtgctggggaggtggctggaacttttttt

SEQ ID NO: 3437 - RNA, 122 nt, synthetic construct
  source 1..122: mol_type = other RNA
ttgccaagtgttccagccacgttttagagctagaaatagcaagttaaaataaggctagtccgttatcaacttgaaaaagtggcaccgagtcggtgcttgccctggggcggtggctggaacac

SEQ ID NO: 3438 - RNA, 122 nt, synthetic construct
  source 1..122: mol_type = other RNA
ttgccaagtgttccagccacgttttagagctagaaatagcaagttaaaataaggctagtccgttatcaacttgaaaaagtggcaccgagtcggtgcattgccctgggtcggtggctggaaca

SEQ ID NO: 3439 - RNA, 122 nt, synthetic construct
  source 1..122: mol_type = other RNA
ttgccaagtgttccagccacgttttagagctagaaatagcaagttaaaataaggctagtccgttatcaacttgaaaaagtggcaccgagtcggtgctgccctggggaggtggctggaacact

SEQ ID NO: 3440 - RNA, 122 nt, synthetic construct
  source 1..122: mol_type = other RNA
ttgccaagtgttccagccacgttttagagctagaaatagcaagttaaaataaggctagtccgttatcaacttgaaaaagtggcaccgagtcggtgcattgccctgggccggtggctggaaca

SEQ ID NO: 3441 - RNA, 122 nt, synthetic construct
  source 1..122: mol_type = other RNA
ttgccaagtgttccagccacgttttagagctagaaatagcaagttaaaataaggctagtccgttatcaacttgaaaaagtggcaccgagtcggtgcgccctggggaggtggctggaacactt

SEQ ID NO: 3442 - RNA, 122 nt, synthetic construct
  source 1..122: mol_type = other RNA
ttgccaagtgttccagccacgttttagagctagaaatagcaagttaaaataaggctagtccgttatcaacttgaaaaagtggcaccgagtcggtgcttgccctgggccggtggctggaacac

SEQ ID NO: 3443 - RNA, 122 nt, synthetic construct
  source 1..122: mol_type = other RNA
ttgccaagtgttccagccacgttttagagctagaaatagcaagttaaaataaggctagtccgttatcaacttgaaaaagtggcaccgagtcggtgctgccctggggcggtggctggaacact

SEQ ID NO: 3444 - RNA, 122 nt, synthetic construct
  source 1..122: mol_type = other RNA
ttgccaagtgttccagccacgttttagagctagaaatagcaagttaaaataaggctagtccgttatcaacttgaaaaagtggcaccgagtcggtgctgccctgggcaggtggctggaacact

SEQ ID NO: 3445 - RNA, 122 nt, synthetic construct
  source 1..122: mol_type = other RNA
ttgccaagtgttccagccacgttttagagctagaaatagcaagttaaaataaggctagtccgttatcaacttgaaaaagtggcaccgagtcggtgctgccctgggaaggtggctggaacact

SEQ ID NO: 3446 - RNA, 122 nt, synthetic construct
  source 1..122: mol_type = other RNA
ttgccaagtgttccagccacgttttagagctagaaatagcaagttaaaataaggctagtccgttatcaacttgaaaaagtggcaccgagtcggtgcttgccctgggacggtggctggaacac

SEQ ID NO: 3447 - RNA, 122 nt, synthetic construct
  source 1..122: mol_type = other RNA
ttgccaagtgttccagccacgttttagagctagaaatagcaagttaaaataaggctagtccgttatcaacttgaaaaagtggcaccgagtcggtgcattgccctgggcaggtggctggaaca

SEQ ID NO: 3448 - RNA, 122 nt, synthetic construct
  source 1..122: mol_type = other RNA
ttgccaagtgttccagccacgttttagagctagaaatagcaagttaaaataaggctagtccgttatcaacttgaaaaagtggcaccgagtcggtgcgccctgggaaggtggctggaacactt

SEQ ID NO: 3449 - RNA, 122 nt, synthetic construct
  source 1..122: mol_type = other RNA
ttgccaagtgttccagccacgttttagagctagaaatagcaagttaaaataaggctagtccgttatcaacttgaaaaagtggcaccgagtcggtgcgccctggggcggtggctggaacactt

SEQ ID NO: 3450 - RNA, 122 nt, synthetic construct
  source 1..122: mol_type = other RNA
ttgccaagtgttccagccacgttttagagctagaaatagcaagttaaaataaggctagtccgttatcaacttgaaaaagtggcaccgagtcggtgcttgccctgggtcggtggctggaacac

SEQ ID NO: 3451 - RNA, 122 nt, synthetic construct
  source 1..122: mol_type = other RNA
ttgccaagtgttccagccacgttttagagctagaaatagcaagttaaaataaggctagtccgttatcaacttgaaaaagtggcaccgagtcggtgctgccctgggtcggtggctggaacact

SEQ ID NO: 3452 - RNA, 122 nt, synthetic construct
  source 1..122: mol_type = other RNA
ttgccaagtgttccagccacgttttagagctagaaatagcaagttaaaataaggctagtccgttatcaacttgaaaaagtggcaccgagtcggtgctgccctgggacggtggctggaacact

SEQ ID NO: 3453 - RNA, 122 nt, synthetic construct
  source 1..122: mol_type = other RNA
ttgccaagtgttccagccacgttttagagctagaaatagcaagttaaaataaggctagtccgttatcaacttgaaaaagtggcaccgagtcggtgcattgccctgggtaggtggctggaaca

SEQ ID NO: 3454 - RNA, 122 nt, synthetic construct
  source 1..122: mol_type = other RNA
ttgccaagtgttccagccacgttttagagctagaaatagcaagttaaaataaggctagtccgttatcaacttgaaaaagtggcaccgagtcggtgcgccctgggtcggtggctggaacactt

SEQ ID NO: 3455 - RNA, 122 nt, synthetic construct
  source 1..122: mol_type = other RNA
ttgccaagtgttccagccacgttttagagctagaaatagcaagttaaaataaggctagtccgttatcaacttgaaaaagtggcaccgagtcggtgcttgccctggggaggtggctggaacac

SEQ ID NO: 3456 - RNA, 122 nt, synthetic construct
  source 1..122: mol_type = other RNA
ttgccaagtgttccagccacgttttagagctagaaatagcaagttaaaataaggctagtccgttatcaacttgaaaaagtggcaccgagtcggtgcttgccctgggtaggtggctggaacac

SEQ ID NO: 3457 - RNA, 122 nt, synthetic construct
  source 1..122: mol_type = other RNA
ttgccaagtgttccagccacgttttagagctagaaatagcaagttaaaataaggctagtccgttatcaacttgaaaaagtggcaccgagtcggtgcgccctgggtaggtggctggaacactt

SEQ ID NO: 3458 - RNA, 122 nt, synthetic construct
  source 1..122: mol_type = other RNA
ttgccaagtgttccagccacgttttagagctagaaatagcaagttaaaataaggctagtccgttatcaacttgaaaaagtggcaccgagtcggtgctgccctgggtaggtggctggaacact

SEQ ID NO: 3459 - RNA, 122 nt, synthetic construct
  source 1..122: mol_type = other RNA
ttgccaagtgttccagccacgttttagagctagaaatagcaagttaaaataaggctagtccgttatcaacttgaaaaagtggcaccgagtcggtgcattgccctgggaaggtggctggaaca

SEQ ID NO: 3460 - RNA, 122 nt, synthetic construct
  source 1..122: mol_type = other RNA
ttgccaagtgttccagccacgttttagagctagaaatagcaagttaaaataaggctagtccgttatcaacttgaaaaagtggcaccgagtcggtgctgccctgggccggtggctggaacact

SEQ ID NO: 3461 - RNA, 122 nt, synthetic construct
  source 1..122: mol_type = other RNA
ttgccaagtgttccagccacgttttagagctagaaatagcaagttaaaataaggctagtccgttatcaacttgaaaaagtggcaccgagtcggtgcgccctgggccggtggctggaacactt

SEQ ID NO: 3462 - RNA, 122 nt, synthetic construct
  source 1..122: mol_type = other RNA
ttgccaagtgttccagccacgttttagagctagaaatagcaagttaaaataaggctagtccgttatcaacttgaaaaagtggcaccgagtcggtgcttgccctgggaaggtggctggaacac

SEQ ID NO: 3463 - RNA, 122 nt, synthetic construct
  source 1..122: mol_type = other RNA
gttgccaagtgttccagccacgttttagagctagaaatagcaagttaaaataaggctagtccgttatcaacttgaaaaagtggcaccgagtcggtgctgggcaggtggctggaacttttttt

SEQ ID NO: 3464 - RNA, 122 nt, synthetic construct
  source 1..122: mol_type = other RNA
ttgccaagtgttccagccacgttttagagctagaaatagcaagttaaaataaggctagtccgttatcaacttgaaaaagtggcaccgagtcggtgcgccctgggcaggtggctggaacactt

SEQ ID NO: 3465 - RNA, 122 nt, synthetic construct
  source 1..122: mol_type = other RNA
gttgccaagtgttccagccacgttttagagctagaaatagcaagttaaaataaggctagtccgttatcaacttgaaaaagtggcaccgagtcggtgctggggcggtggctggaacttttttt

SEQ ID NO: 3466 - RNA, 122 nt, synthetic construct
  source 1..122: mol_type = other RNA
gttgccaagtgttccagccacgttttagagctagaaatagcaagttaaaataaggctagtccgttatcaacttgaaaaagtggcaccgagtcggtgctgggacggtggctggaacttttttt

SEQ ID NO: 3467 - RNA, 122 nt, synthetic construct
  source 1..122: mol_type = other RNA
ttgccaagtgttccagccacgttttagagctagaaatagcaagttaaaataaggctagtccgttatcaacttgaaaaagtggcaccgagtcggtgcattgccctgggacggtggctggaaca

SEQ ID NO: 3468 - RNA, 122 nt, synthetic construct
  source 1..122: mol_type = other RNA
gttgccaagtgttccagccacgttttagagctagaaatagcaagttaaaataaggctagtccgttatcaacttgaaaaagtggcaccgagtcggtgctgggtaggtggctggaacttttttt

SEQ ID NO: 3469 - RNA, 122 nt, synthetic construct
  source 1..122: mol_type = other RNA
gttgccaagtgttccagccacgttttagagctagaaatagcaagttaaaataaggctagtccgttatcaacttgaaaaagtggcaccgagtcggtgctgggaaggtggctggaacttttttt

SEQ ID NO: 3470 - RNA, 122 nt, synthetic construct
  source 1..122: mol_type = other RNA
gttgccaagtgttccagccacgttttagagctagaaatagcaagttaaaataaggctagtccgttatcaacttgaaaaagtggcaccgagtcggtgctgggtcggtggctggaacttttttt

SEQ ID NO: 3471 - RNA, 122 nt, synthetic construct
  source 1..122: mol_type = other RNA
gttgccaagtgttccagccacgttttagagctagaaatagcaagttaaaataaggctagtccgttatcaacttgaaaaagtggcaccgagtcggtgctgggccggtggctggaacttttttt

SEQ ID NO: 3472 - RNA, 122 nt, synthetic construct
  source 1..122: mol_type = other RNA
ttgccaagtgttccagccacgttttagagctagaaatagcaagttaaaataaggctagtccgttatcaacttgaaaaagtggcaccgagtcggtgcgccctgggacggtggctggaacactt

SEQ ID NO: 3473 - RNA, 122 nt, synthetic construct
  source 1..122: mol_type = other RNA
ttgccaagtgttccagccacgttttagagctagaaatagcaagttaaaataaggctagtccgttatcaacttgaaaaagtggcaccgagtcggtgcttgccctgggcaggtggctggaacac

SEQ ID NO: 3474 - RNA, 122 nt, synthetic construct
  source 1..122: mol_type = other RNA
ttgccaagtgttccagccacgttttagagctagaaatagcaagttaaaataaggctagtccgttatcaacttgaaaaagtggcaccgagtcggtgcattgccctggggcggtggctggaaca

SEQ ID NO: 3475 - RNA, 122 nt, synthetic construct
  source 1..122: mol_type = other RNA
ttgccaagtgttccagccacgttttagagctagaaatagcaagttaaaataaggctagtccgttatcaacttgaaaaagtggcaccgagtcggtgcattgccctggggaggtggctggaaca

SEQ ID NO: 3476 - RNA, 123 nt, synthetic construct
  source 1..123: mol_type = other RNA
ttgccaagtgttccagccacgttttagagctagaaatagcaagttaaaataaggctagtccgttatcaacttgaaaaagtggcaccgagtcggtgcgccctggggaggtggctggaacacttg

SEQ ID NO: 3477 - RNA, 123 nt, synthetic construct
  source 1..123: mol_type = other RNA
ttgccaagtgttccagccacgttttagagctagaaatagcaagttaaaataaggctagtccgttatcaacttgaaaaagtggcaccgagtcggtgcattgccctgggcaggtggctggaacac

SEQ ID NO: 3478 - RNA, 123 nt, synthetic construct
  source 1..123: mol_type = other RNA
ttgccaagtgttccagccacgttttagagctagaaatagcaagttaaaataaggctagtccgttatcaacttgaaaaagtggcaccgagtcggtgcttgccctgggcaggtggctggaacact

SEQ ID NO: 3479 - RNA, 123 nt, synthetic construct
  source 1..123: mol_type = other RNA
ttgccaagtgttccagccacgttttagagctagaaatagcaagttaaaataaggctagtccgttatcaacttgaaaaagtggcaccgagtcggtgcattgccctggggcggtggctggaacac

SEQ ID NO: 3480 - RNA, 123 nt, synthetic construct
  source 1..123: mol_type = other RNA
ttgccaagtgttccagccacgttttagagctagaaatagcaagttaaaataaggctagtccgttatcaacttgaaaaagtggcaccgagtcggtgctgccctgggtaggtggctggaacactt

SEQ ID NO: 3481 - RNA, 123 nt, synthetic construct
  source 1..123: mol_type = other RNA
ttgccaagtgttccagccacgttttagagctagaaatagcaagttaaaataaggctagtccgttatcaacttgaaaaagtggcaccgagtcggtgctcattgccctgggtaggtggctggaac

SEQ ID NO: 3482 - RNA, 123 nt, synthetic construct
  source 1..123: mol_type = other RNA
ttgccaagtgttccagccacgttttagagctagaaatagcaagttaaaataaggctagtccgttatcaacttgaaaaagtggcaccgagtcggtgcgccctgggtcggtggctggaacacttg

SEQ ID NO: 3483 - RNA, 123 nt, synthetic construct
  source 1..123: mol_type = other RNA
ttgccaagtgttccagccacgttttagagctagaaatagcaagttaaaataaggctagtccgttatcaacttgaaaaagtggcaccgagtcggtgcgccctgggacggtggctggaacacttg

SEQ ID NO: 3484 - RNA, 123 nt, synthetic construct
  source 1..123: mol_type = other RNA
gttgccaagtgttccagccacgttttagagctagaaatagcaagttaaaataaggctagtccgttatcaacttgaaaaagtggcaccgagtcggtgctgggcaggtggctggaacattttttt

SEQ ID NO: 3485 - RNA, 123 nt, synthetic construct
  source 1..123: mol_type = other RNA
ttgccaagtgttccagccacgttttagagctagaaatagcaagttaaaataaggctagtccgttatcaacttgaaaaagtggcaccgagtcggtgcattgccctgggaaggtggctggaacac

SEQ ID NO: 3486 - RNA, 123 nt, synthetic construct
  source 1..123: mol_type = other RNA
ttgccaagtgttccagccacgttttagagctagaaatagcaagttaaaataaggctagtccgttatcaacttgaaaaagtggcaccgagtcggtgctcattgccctggggaggtggctggaac

SEQ ID NO: 3487 - RNA, 123 nt, synthetic construct
  source 1..123: mol_type = other RNA
ttgccaagtgttccagccacgttttagagctagaaatagcaagttaaaataaggctagtccgttatcaacttgaaaaagtggcaccgagtcggtgcgccctggggcggtggctggaacacttg

SEQ ID NO: 3488 - RNA, 123 nt, synthetic construct
  source 1..123: mol_type = other RNA
ttgccaagtgttccagccacgttttagagctagaaatagcaagttaaaataaggctagtccgttatcaacttgaaaaagtggcaccgagtcggtgctgccctggggaggtggctggaacactt

SEQ ID NO: 3489 - RNA, 123 nt, synthetic construct
  source 1..123: mol_type = other RNA
ttgccaagtgttccagccacgttttagagctagaaatagcaagttaaaataaggctagtccgttatcaacttgaaaaagtggcaccgagtcggtgcgccctgggccggtggctggaacacttg

SEQ ID NO: 3490 - RNA, 123 nt, synthetic construct
  source 1..123: mol_type = other RNA
ttgccaagtgttccagccacgttttagagctagaaatagcaagttaaaataaggctagtccgttatcaacttgaaaaagtggcaccgagtcggtgcgccctgggtaggtggctggaacacttg

SEQ ID NO: 3491 - RNA, 123 nt, synthetic construct
  source 1..123: mol_type = other RNA
ttgccaagtgttccagccacgttttagagctagaaatagcaagttaaaataaggctagtccgttatcaacttgaaaaagtggcaccgagtcggtgctgccctgggccggtggctggaacactt

SEQ ID NO: 3492 - RNA, 123 nt, synthetic construct
  source 1..123: mol_type = other RNA
ttgccaagtgttccagccacgttttagagctagaaatagcaagttaaaataaggctagtccgttatcaacttgaaaaagtggcaccgagtcggtgctgccctgggacggtggctggaacactt

SEQ ID NO: 3493 - RNA, 123 nt, synthetic construct
  source 1..123: mol_type = other RNA
ttgccaagtgttccagccacgttttagagctagaaatagcaagttaaaataaggctagtccgttatcaacttgaaaaagtggcaccgagtcggtgcttgccctggggcggtggctggaacact

SEQ ID NO: 3494 - RNA, 123 nt, synthetic construct
  source 1..123: mol_type = other RNA
ttgccaagtgttccagccacgttttagagctagaaatagcaagttaaaataaggctagtccgttatcaacttgaaaaagtggcaccgagtcggtgctcattgccctgggacggtggctggaac

SEQ ID NO: 3495 - RNA, 123 nt, synthetic construct
  source 1..123: mol_type = other RNA
ttgccaagtgttccagccacgttttagagctagaaatagcaagttaaaataaggctagtccgttatcaacttgaaaaagtggcaccgagtcggtgctcattgccctgggtcggtggctggaac

SEQ ID NO: 3496 - RNA, 123 nt, synthetic construct
  source 1..123: mol_type = other RNA
ttgccaagtgttccagccacgttttagagctagaaatagcaagttaaaataaggctagtccgttatcaacttgaaaaagtggcaccgagtcggtgctgccctgggtcggtggctggaacactt

SEQ ID NO: 3497 - RNA, 123 nt, synthetic construct
  source 1..123: mol_type = other RNA
ttgccaagtgttccagccacgttttagagctagaaatagcaagttaaaataaggctagtccgttatcaacttgaaaaagtggcaccgagtcggtgcgccctgggaaggtggctggaacacttg

SEQ ID NO: 3498 - RNA, 123 nt, synthetic construct
  source 1..123: mol_type = other RNA
ttgccaagtgttccagccacgttttagagctagaaatagcaagttaaaataaggctagtccgttatcaacttgaaaaagtggcaccgagtcggtgcttgccctggggaggtggctggaacact

SEQ ID NO: 3499 - RNA, 123 nt, synthetic construct
  source 1..123: mol_type = other RNA
ttgccaagtgttccagccacgttttagagctagaaatagcaagttaaaataaggctagtccgttatcaacttgaaaaagtggcaccgagtcggtgcattgccctgggccggtggctggaacac

SEQ ID NO: 3500 - RNA, 123 nt, synthetic construct
  source 1..123: mol_type = other RNA
ttgccaagtgttccagccacgttttagagctagaaatagcaagttaaaataaggctagtccgttatcaacttgaaaaagtggcaccgagtcggtgctcattgccctgggaaggtggctggaac

SEQ ID NO: 3501 - RNA, 123 nt, synthetic construct
  source 1..123: mol_type = other RNA
gttgccaagtgttccagccacgttttagagctagaaatagcaagttaaaataaggctagtccgttatcaacttgaaaaagtggcaccgagtcggtgctggggcggtggctggaacattttttt

SEQ ID NO: 3502 - RNA, 123 nt, synthetic construct
  source 1..123: mol_type = other RNA
ttgccaagtgttccagccacgttttagagctagaaatagcaagttaaaataaggctagtccgttatcaacttgaaaaagtggcaccgagtcggtgcttgccctgggacggtggctggaacact

SEQ ID NO: 3503 - RNA, 123 nt, synthetic construct
  source 1..123: mol_type = other RNA
gttgccaagtgttccagccacgttttagagctagaaatagcaagttaaaataaggctagtccgttatcaacttgaaaaagtggcaccgagtcggtgctggggaggtggctggaacattttttt

SEQ ID NO: 3504 - RNA, 123 nt, synthetic construct
  source 1..123: mol_type = other RNA
ttgccaagtgttccagccacgttttagagctagaaatagcaagttaaaataaggctagtccgttatcaacttgaaaaagtggcaccgagtcggtgctgccctgggaaggtggctggaacactt

SEQ ID NO: 3505 - RNA, 123 nt, synthetic construct
  source 1..123: mol_type = other RNA
gttgccaagtgttccagccacgttttagagctagaaatagcaagttaaaataaggctagtccgttatcaacttgaaaaagtggcaccgagtcggtgctgggtaggtggctggaacattttttt

SEQ ID NO: 3506 - RNA, 123 nt, synthetic construct
  source 1..123: mol_type = other RNA
ttgccaagtgttccagccacgttttagagctagaaatagcaagttaaaataaggctagtccgttatcaacttgaaaaagtggcaccgagtcggtgctgccctggggcggtggctggaacactt

SEQ ID NO: 3507 - RNA, 123 nt, synthetic construct
  source 1..123: mol_type = other RNA
ttgccaagtgttccagccacgttttagagctagaaatagcaagttaaaataaggctagtccgttatcaacttgaaaaagtggcaccgagtcggtgcttgccctgggtaggtggctggaacact

SEQ ID NO: 3508 - RNA, 123 nt, synthetic construct
  source 1..123: mol_type = other RNA
gttgccaagtgttccagccacgttttagagctagaaatagcaagttaaaataaggctagtccgttatcaacttgaaaaagtggcaccgagtcggtgctgggacggtggctggaacattttttt

SEQ ID NO: 3509 - RNA, 123 nt, synthetic construct
  source 1..123: mol_type = other RNA
ttgccaagtgttccagccacgttttagagctagaaatagcaagttaaaataaggctagtccgttatcaacttgaaaaagtggcaccgagtcggtgcattgccctgggtcggtggctggaacac

SEQ ID NO: 3510 - RNA, 123 nt, synthetic construct
  source 1..123: mol_type = other RNA
gttgccaagtgttccagccacgttttagagctagaaatagcaagttaaaataaggctagtccgttatcaacttgaaaaagtggcaccgagtcggtgctgggaaggtggctggaacattttttt

SEQ ID NO: 3511 - RNA, 123 nt, synthetic construct
  source 1..123: mol_type = other RNA
ttgccaagtgttccagccacgttttagagctagaaatagcaagttaaaataaggctagtccgttatcaacttgaaaaagtggcaccgagtcggtgcattgccctgggacggtggctggaacac

SEQ ID NO: 3512 - RNA, 123 nt, synthetic construct
  source 1..123: mol_type = other RNA
ttgccaagtgttccagccacgttttagagctagaaatagcaagttaaaataaggctagtccgttatcaacttgaaaaagtggcaccgagtcggtgcttgccctgggccggtggctggaacact

SEQ ID NO: 3513 - RNA, 123 nt, synthetic construct
  source 1..123: mol_type = other RNA
ttgccaagtgttccagccacgttttagagctagaaatagcaagttaaaataaggctagtccgttatcaacttgaaaaagtggcaccgagtcggtgcttgccctgggaaggtggctggaacact

SEQ ID NO: 3514 - RNA, 123 nt, synthetic construct
  source 1..123: mol_type = other RNA
ttgccaagtgttccagccacgttttagagctagaaatagcaagttaaaataaggctagtccgttatcaacttgaaaaagtggcaccgagtcggtgctcattgccctgggcaggtggctggaac

SEQ ID NO: 3515 - RNA, 123 nt, synthetic construct
  source 1..123: mol_type = other RNA
ttgccaagtgttccagccacgttttagagctagaaatagcaagttaaaataaggctagtccgttatcaacttgaaaaagtggcaccgagtcggtgctgccctgggcaggtggctggaacactt

SEQ ID NO: 3516 - RNA, 123 nt, synthetic construct
  source 1..123: mol_type = other RNA
ttgccaagtgttccagccacgttttagagctagaaatagcaagttaaaataaggctagtccgttatcaacttgaaaaagtggcaccgagtcggtgcttgccctgggtcggtggctggaacact

SEQ ID NO: 3517 - RNA, 123 nt, synthetic construct
  source 1..123: mol_type = other RNA
ttgccaagtgttccagccacgttttagagctagaaatagcaagttaaaataaggctagtccgttatcaacttgaaaaagtggcaccgagtcggtgcgccctgggcaggtggctggaacacttg

SEQ ID NO: 3518 - RNA, 123 nt, synthetic construct
  source 1..123: mol_type = other RNA
ttgccaagtgttccagccacgttttagagctagaaatagcaagttaaaataaggctagtccgttatcaacttgaaaaagtggcaccgagtcggtgctcattgccctggggcggtggctggaac

SEQ ID NO: 3519 - RNA, 123 nt, synthetic construct
  source 1..123: mol_type = other RNA
ttgccaagtgttccagccacgttttagagctagaaatagcaagttaaaataaggctagtccgttatcaacttgaaaaagtggcaccgagtcggtgcattgccctgggtaggtggctggaacac

SEQ ID NO: 3520 - RNA, 123 nt, synthetic construct
  source 1..123: mol_type = other RNA
ttgccaagtgttccagccacgttttagagctagaaatagcaagttaaaataaggctagtccgttatcaacttgaaaaagtggcaccgagtcggtgctcattgccctgggccggtggctggaac

SEQ ID NO: 3521 - RNA, 123 nt, synthetic construct
  source 1..123: mol_type = other RNA
gttgccaagtgttccagccacgttttagagctagaaatagcaagttaaaataaggctagtccgttatcaacttgaaaaagtggcaccgagtcggtgctgggccggtggctggaacattttttt

SEQ ID NO: 3522 - RNA, 123 nt, synthetic construct
  source 1..123: mol_type = other RNA
gttgccaagtgttccagccacgttttagagctagaaatagcaagttaaaataaggctagtccgttatcaacttgaaaaagtggcaccgagtcggtgctgggtcggtggctggaacattttttt

SEQ ID NO: 3523 - RNA, 123 nt, synthetic construct
  source 1..123: mol_type = other RNA
ttgccaagtgttccagccacgttttagagctagaaatagcaagttaaaataaggctagtccgttatcaacttgaaaaagtggcaccgagtcggtgcattgccctggggaggtggctggaacac

SEQ ID NO: 3524 - RNA, 124 nt, synthetic construct
  source 1..124: mol_type = other RNA
ttgccaagtgttccagccacgttttagagctagaaatagcaagttaaaataaggctagtccgttatcaacttgaaaaagtggcaccgagtcggtgcgccctgggccggtggctggaacacttgg

SEQ ID NO: 3525 - RNA, 124 nt, synthetic construct
  source 1..124: mol_type = other RNA
ttgccaagtgttccagccacgttttagagctagaaatagcaagttaaaataaggctagtccgttatcaacttgaaaaagtggcaccgagtcggtgcattgccctgggaaggtggctggaacact

SEQ ID NO: 3526 - RNA, 124 nt, synthetic construct
  source 1..124: mol_type = other RNA
ttgccaagtgttccagccacgttttagagctagaaatagcaagttaaaataaggctagtccgttatcaacttgaaaaagtggcaccgagtcggtgctcattgccctgggaaggtggctggaaca

SEQ ID NO: 3527 - RNA, 124 nt, synthetic construct
  source 1..124: mol_type = other RNA
ttgccaagtgttccagccacgttttagagctagaaatagcaagttaaaataaggctagtccgttatcaacttgaaaaagtggcaccgagtcggtgcttgccctgggaaggtggctggaacactt

SEQ ID NO: 3528 - RNA, 124 nt, synthetic construct
  source 1..124: mol_type = other RNA
ttgccaagtgttccagccacgttttagagctagaaatagcaagttaaaataaggctagtccgttatcaacttgaaaaagtggcaccgagtcggtgcttcattgccctgggccggtggctggaac

SEQ ID NO: 3529 - RNA, 124 nt, synthetic construct
  source 1..124: mol_type = other RNA
ttgccaagtgttccagccacgttttagagctagaaatagcaagttaaaataaggctagtccgttatcaacttgaaaaagtggcaccgagtcggtgcattgccctggggcggtggctggaacact

SEQ ID NO: 3530 - RNA, 124 nt, synthetic construct
  source 1..124: mol_type = other RNA
ttgccaagtgttccagccacgttttagagctagaaatagcaagttaaaataaggctagtccgttatcaacttgaaaaagtggcaccgagtcggtgctgccctgggaaggtggctggaacacttg

SEQ ID NO: 3531 - RNA, 124 nt, synthetic construct
  source 1..124: mol_type = other RNA
ttgccaagtgttccagccacgttttagagctagaaatagcaagttaaaataaggctagtccgttatcaacttgaaaaagtggcaccgagtcggtgcttcattgccctgggaaggtggctggaac

SEQ ID NO: 3532 - RNA, 124 nt, synthetic construct
  source 1..124: mol_type = other RNA
ttgccaagtgttccagccacgttttagagctagaaatagcaagttaaaataaggctagtccgttatcaacttgaaaaagtggcaccgagtcggtgcttgccctgggtcggtggctggaacactt

SEQ ID NO: 3533 - RNA, 124 nt, synthetic construct
  source 1..124: mol_type = other RNA
gttgccaagtgttccagccacgttttagagctagaaatagcaagttaaaataaggctagtccgttatcaacttgaaaaagtggcaccgagtcggtgctgggccggtggctggaacacttttttt

SEQ ID NO: 3534 - RNA, 124 nt, synthetic construct
  source 1..124: mol_type = other RNA
ttgccaagtgttccagccacgttttagagctagaaatagcaagttaaaataaggctagtccgttatcaacttgaaaaagtggcaccgagtcggtgcattgccctgggtcggtggctggaacact

SEQ ID NO: 3535 - RNA, 124 nt, synthetic construct
  source 1..124: mol_type = other RNA
ttgccaagtgttccagccacgttttagagctagaaatagcaagttaaaataaggctagtccgttatcaacttgaaaaagtggcaccgagtcggtgcattgccctgggtaggtggctggaacact

SEQ ID NO: 3536 - RNA, 124 nt, synthetic construct
  source 1..124: mol_type = other RNA
ttgccaagtgttccagccacgttttagagctagaaatagcaagttaaaataaggctagtccgttatcaacttgaaaaagtggcaccgagtcggtgcttcattgccctgggtcggtggctggaac

SEQ ID NO: 3537 - RNA, 124 nt, synthetic construct
  source 1..124: mol_type = other RNA
ttgccaagtgttccagccacgttttagagctagaaatagcaagttaaaataaggctagtccgttatcaacttgaaaaagtggcaccgagtcggtgcttgccctgggccggtggctggaacactt

SEQ ID NO: 3538 - RNA, 124 nt, synthetic construct
  source 1..124: mol_type = other RNA
gttgccaagtgttccagccacgttttagagctagaaatagcaagttaaaataaggctagtccgttatcaacttgaaaaagtggcaccgagtcggtgctgggacggtggctggaacacttttttt

SEQ ID NO: 3539 - RNA, 124 nt, synthetic construct
  source 1..124: mol_type = other RNA
ttgccaagtgttccagccacgttttagagctagaaatagcaagttaaaataaggctagtccgttatcaacttgaaaaagtggcaccgagtcggtgcgccctggggcggtggctggaacacttgg

SEQ ID NO: 3540 - RNA, 124 nt, synthetic construct
  source 1..124: mol_type = other RNA
ttgccaagtgttccagccacgttttagagctagaaatagcaagttaaaataaggctagtccgttatcaacttgaaaaagtggcaccgagtcggtgctgccctgggccggtggctggaacacttg

SEQ ID NO: 3541 - RNA, 124 nt, synthetic construct
  source 1..124: mol_type = other RNA
ttgccaagtgttccagccacgttttagagctagaaatagcaagttaaaataaggctagtccgttatcaacttgaaaaagtggcaccgagtcggtgctcattgccctgggccggtggctggaaca

SEQ ID NO: 3542 - RNA, 124 nt, synthetic construct
  source 1..124: mol_type = other RNA
ttgccaagtgttccagccacgttttagagctagaaatagcaagttaaaataaggctagtccgttatcaacttgaaaaagtggcaccgagtcggtgcttgccctgggacggtggctggaacactt

SEQ ID NO: 3543 - RNA, 124 nt, synthetic construct
  source 1..124: mol_type = other RNA
ttgccaagtgttccagccacgttttagagctagaaatagcaagttaaaataaggctagtccgttatcaacttgaaaaagtggcaccgagtcggtgcgccctgggaaggtggctggaacacttgg

SEQ ID NO: 3544 - RNA, 124 nt, synthetic construct
  source 1..124: mol_type = other RNA
ttgccaagtgttccagccacgttttagagctagaaatagcaagttaaaataaggctagtccgttatcaacttgaaaaagtggcaccgagtcggtgcttcattgccctggggaggtggctggaac

SEQ ID NO: 3545 - RNA, 124 nt, synthetic construct
  source 1..124: mol_type = other RNA
ttgccaagtgttccagccacgttttagagctagaaatagcaagttaaaataaggctagtccgttatcaacttgaaaaagtggcaccgagtcggtgcgccctgggtcggtggctggaacacttgg

SEQ ID NO: 3546 - RNA, 124 nt, synthetic construct
  source 1..124: mol_type = other RNA
ttgccaagtgttccagccacgttttagagctagaaatagcaagttaaaataaggctagtccgttatcaacttgaaaaagtggcaccgagtcggtgctgccctggggaggtggctggaacacttg

SEQ ID NO: 3547 - RNA, 124 nt, synthetic construct
  source 1..124: mol_type = other RNA
ttgccaagtgttccagccacgttttagagctagaaatagcaagttaaaataaggctagtccgttatcaacttgaaaaagtggcaccgagtcggtgctcattgccctggggaggtggctggaaca

SEQ ID NO: 3548 - RNA, 124 nt, synthetic construct
  source 1..124: mol_type = other RNA
ttgccaagtgttccagccacgttttagagctagaaatagcaagttaaaataaggctagtccgttatcaacttgaaaaagtggcaccgagtcggtgcttcattgccctgggcaggtggctggaac

SEQ ID NO: 3549 - RNA, 124 nt, synthetic construct
  source 1..124: mol_type = other RNA
ttgccaagtgttccagccacgttttagagctagaaatagcaagttaaaataaggctagtccgttatcaacttgaaaaagtggcaccgagtcggtgctgccctgggtaggtggctggaacacttg

SEQ ID NO: 3550 - RNA, 124 nt, synthetic construct
  source 1..124: mol_type = other RNA
ttgccaagtgttccagccacgttttagagctagaaatagcaagttaaaataaggctagtccgttatcaacttgaaaaagtggcaccgagtcggtgcattgccctgggcaggtggctggaacact

SEQ ID NO: 3551 - RNA, 124 nt, synthetic construct
  source 1..124: mol_type = other RNA
ttgccaagtgttccagccacgttttagagctagaaatagcaagttaaaataaggctagtccgttatcaacttgaaaaagtggcaccgagtcggtgctcattgccctggggcggtggctggaaca

SEQ ID NO: 3552 - RNA, 124 nt, synthetic construct
  source 1..124: mol_type = other RNA
ttgccaagtgttccagccacgttttagagctagaaatagcaagttaaaataaggctagtccgttatcaacttgaaaaagtggcaccgagtcggtgctgccctgggcaggtggctggaacacttg

SEQ ID NO: 3553 - RNA, 124 nt, synthetic construct
  source 1..124: mol_type = other RNA
ttgccaagtgttccagccacgttttagagctagaaatagcaagttaaaataaggctagtccgttatcaacttgaaaaagtggcaccgagtcggtgctgccctgggtcggtggctggaacacttg

SEQ ID NO: 3554 - RNA, 124 nt, synthetic construct
  source 1..124: mol_type = other RNA
ttgccaagtgttccagccacgttttagagctagaaatagcaagttaaaataaggctagtccgttatcaacttgaaaaagtggcaccgagtcggtgctgccctggggcggtggctggaacacttg

SEQ ID NO: 3555 - RNA, 124 nt, synthetic construct
  source 1..124: mol_type = other RNA
ttgccaagtgttccagccacgttttagagctagaaatagcaagttaaaataaggctagtccgttatcaacttgaaaaagtggcaccgagtcggtgctcattgccctgggacggtggctggaaca

SEQ ID NO: 3556 - RNA, 124 nt, synthetic construct
  source 1..124: mol_type = other RNA
gttgccaagtgttccagccacgttttagagctagaaatagcaagttaaaataaggctagtccgttatcaacttgaaaaagtggcaccgagtcggtgctgggaaggtggctggaacacttttttt

SEQ ID NO: 3557 - RNA, 124 nt, synthetic construct
  source 1..124: mol_type = other RNA
ttgccaagtgttccagccacgttttagagctagaaatagcaagttaaaataaggctagtccgttatcaacttgaaaaagtggcaccgagtcggtgcattgccctggggaggtggctggaacact

SEQ ID NO: 3558 - RNA, 124 nt, synthetic construct
  source 1..124: mol_type = other RNA
ttgccaagtgttccagccacgttttagagctagaaatagcaagttaaaataaggctagtccgttatcaacttgaaaaagtggcaccgagtcggtgctcattgccctgggcaggtggctggaaca

SEQ ID NO: 3559 - RNA, 124 nt, synthetic construct
  source 1..124: mol_type = other RNA
ttgccaagtgttccagccacgttttagagctagaaatagcaagttaaaataaggctagtccgttatcaacttgaaaaagtggcaccgagtcggtgcttgccctggggaggtggctggaacactt

SEQ ID NO: 3560 - RNA, 124 nt, synthetic construct
  source 1..124: mol_type = other RNA
ttgccaagtgttccagccacgttttagagctagaaatagcaagttaaaataaggctagtccgttatcaacttgaaaaagtggcaccgagtcggtgcttcattgccctgggacggtggctggaac

SEQ ID NO: 3561 - RNA, 124 nt, synthetic construct
  source 1..124: mol_type = other RNA
ttgccaagtgttccagccacgttttagagctagaaatagcaagttaaaataaggctagtccgttatcaacttgaaaaagtggcaccgagtcggtgctcattgccctgggtcggtggctggaaca

SEQ ID NO: 3562 - RNA, 124 nt, synthetic construct
  source 1..124: mol_type = other RNA
gttgccaagtgttccagccacgttttagagctagaaatagcaagttaaaataaggctagtccgttatcaacttgaaaaagtggcaccgagtcggtgctggggcggtggctggaacacttttttt

SEQ ID NO: 3563 - RNA, 124 nt, synthetic construct
  source 1..124: mol_type = other RNA
gttgccaagtgttccagccacgttttagagctagaaatagcaagttaaaataaggctagtccgttatcaacttgaaaaagtggcaccgagtcggtgctggggaggtggctggaacacttttttt

SEQ ID NO: 3564 - RNA, 124 nt, synthetic construct
  source 1..124: mol_type = other RNA
gttgccaagtgttccagccacgttttagagctagaaatagcaagttaaaataaggctagtccgttatcaacttgaaaaagtggcaccgagtcggtgctgggtaggtggctggaacacttttttt

SEQ ID NO: 3565 - RNA, 124 nt, synthetic construct
  source 1..124: mol_type = other RNA
ttgccaagtgttccagccacgttttagagctagaaatagcaagttaaaataaggctagtccgttatcaacttgaaaaagtggcaccgagtcggtgcttgccctgggcaggtggctggaacactt

SEQ ID NO: 3566 - RNA, 124 nt, synthetic construct
  source 1..124: mol_type = other RNA
ttgccaagtgttccagccacgttttagagctagaaatagcaagttaaaataaggctagtccgttatcaacttgaaaaagtggcaccgagtcggtgcattgccctgggccggtggctggaacact

SEQ ID NO: 3567 - RNA, 124 nt, synthetic construct
  source 1..124: mol_type = other RNA
ttgccaagtgttccagccacgttttagagctagaaatagcaagttaaaataaggctagtccgttatcaacttgaaaaagtggcaccgagtcggtgcgccctgggtaggtggctggaacacttgg

SEQ ID NO: 3568 - RNA, 124 nt, synthetic construct
  source 1..124: mol_type = other RNA
gttgccaagtgttccagccacgttttagagctagaaatagcaagttaaaataaggctagtccgttatcaacttgaaaaagtggcaccgagtcggtgctgggcaggtggctggaacacttttttt

SEQ ID NO: 3569 - RNA, 124 nt, synthetic construct
  source 1..124: mol_type = other RNA
gttgccaagtgttccagccacgttttagagctagaaatagcaagttaaaataaggctagtccgttatcaacttgaaaaagtggcaccgagtcggtgctgggtcggtggctggaacacttttttt

SEQ ID NO: 3570 - RNA, 124 nt, synthetic construct
  source 1..124: mol_type = other RNA
ttgccaagtgttccagccacgttttagagctagaaatagcaagttaaaataaggctagtccgttatcaacttgaaaaagtggcaccgagtcggtgctgccctgggacggtggctggaacacttg

SEQ ID NO: 3571 - RNA, 124 nt, synthetic construct
  source 1..124: mol_type = other RNA
ttgccaagtgttccagccacgttttagagctagaaatagcaagttaaaataaggctagtccgttatcaacttgaaaaagtggcaccgagtcggtgcttgccctggggcggtggctggaacactt

SEQ ID NO: 3572 - RNA, 124 nt, synthetic construct
  source 1..124: mol_type = other RNA
ttgccaagtgttccagccacgttttagagctagaaatagcaagttaaaataaggctagtccgttatcaacttgaaaaagtggcaccgagtcggtgcttcattgccctggggcggtggctggaac

SEQ ID NO: 3573 - RNA, 124 nt, synthetic construct
  source 1..124: mol_type = other RNA
ttgccaagtgttccagccacgttttagagctagaaatagcaagttaaaataaggctagtccgttatcaacttgaaaaagtggcaccgagtcggtgcttcattgccctgggtaggtggctggaac

SEQ ID NO: 3574 - RNA, 124 nt, synthetic construct
  source 1..124: mol_type = other RNA
ttgccaagtgttccagccacgttttagagctagaaatagcaagttaaaataaggctagtccgttatcaacttgaaaaagtggcaccgagtcggtgcgccctggggaggtggctggaacacttgg

SEQ ID NO: 3575 - RNA, 124 nt, synthetic construct
  source 1..124: mol_type = other RNA
ttgccaagtgttccagccacgttttagagctagaaatagcaagttaaaataaggctagtccgttatcaacttgaaaaagtggcaccgagtcggtgcttgccctgggtaggtggctggaacactt

SEQ ID NO: 3576 - RNA, 124 nt, synthetic construct
  source 1..124: mol_type = other RNA
ttgccaagtgttccagccacgttttagagctagaaatagcaagttaaaataaggctagtccgttatcaacttgaaaaagtggcaccgagtcggtgctcattgccctgggtaggtggctggaaca

SEQ ID NO: 3577 - RNA, 124 nt, synthetic construct
  source 1..124: mol_type = other RNA
ttgccaagtgttccagccacgttttagagctagaaatagcaagttaaaataaggctagtccgttatcaacttgaaaaagtggcaccgagtcggtgcgccctgggacggtggctggaacacttgg

SEQ ID NO: 3578 - RNA, 124 nt, synthetic construct
  source 1..124: mol_type = other RNA
ttgccaagtgttccagccacgttttagagctagaaatagcaagttaaaataaggctagtccgttatcaacttgaaaaagtggcaccgagtcggtgcattgccctgggacggtggctggaacact

SEQ ID NO: 3579 - RNA, 124 nt, synthetic construct
  source 1..124: mol_type = other RNA
ttgccaagtgttccagccacgttttagagctagaaatagcaagttaaaataaggctagtccgttatcaacttgaaaaagtggcaccgagtcggtgcgccctgggcaggtggctggaacacttgg

SEQ ID NO: 3580 - RNA, 125 nt, synthetic construct
  source 1..125: mol_type = other RNA
gttgccaagtgttccagccacgttttagagctagaaatagcaagttaaaataaggctagtccgttatcaacttgaaaaagtggcaccgagtcggtgctgggtcggtggctggaacactttttttt

SEQ ID NO: 3581 - RNA, 125 nt, synthetic construct
  source 1..125: mol_type = other RNA
gttgccaagtgttccagccacgttttagagctagaaatagcaagttaaaataaggctagtccgttatcaacttgaaaaagtggcaccgagtcggtgctggggcggtggctggaacactttttttt

SEQ ID NO: 3582 - RNA, 125 nt, synthetic construct
  source 1..125: mol_type = other RNA
gttgccaagtgttccagccacgttttagagctagaaatagcaagttaaaataaggctagtccgttatcaacttgaaaaagtggcaccgagtcggtgctggggaggtggctggaacactttttttt

SEQ ID NO: 3583 - RNA, 125 nt, synthetic construct
  source 1..125: mol_type = other RNA
ttgccaagtgttccagccacgttttagagctagaaatagcaagttaaaataaggctagtccgttatcaacttgaaaaagtggcaccgagtcggtgctcattgccctgggacggtggctggaacac

SEQ ID NO: 3584 - RNA, 125 nt, synthetic construct
  source 1..125: mol_type = other RNA
ttgccaagtgttccagccacgttttagagctagaaatagcaagttaaaataaggctagtccgttatcaacttgaaaaagtggcaccgagtcggtgcttgccctgggccggtggctggaacacttg

SEQ ID NO: 3585 - RNA, 125 nt, synthetic construct
  source 1..125: mol_type = other RNA
ttgccaagtgttccagccacgttttagagctagaaatagcaagttaaaataaggctagtccgttatcaacttgaaaaagtggcaccgagtcggtgcttgccctgggacggtggctggaacacttg

SEQ ID NO: 3586 - RNA, 125 nt, synthetic construct
  source 1..125: mol_type = other RNA
ttgccaagtgttccagccacgttttagagctagaaatagcaagttaaaataaggctagtccgttatcaacttgaaaaagtggcaccgagtcggtgcttcattgccctggggcggtggctggaaca

SEQ ID NO: 3587 - RNA, 125 nt, synthetic construct
  source 1..125: mol_type = other RNA
ttgccaagtgttccagccacgttttagagctagaaatagcaagttaaaataaggctagtccgttatcaacttgaaaaagtggcaccgagtcggtgcttgccctgggcaggtggctggaacacttg

SEQ ID NO: 3588 - RNA, 125 nt, synthetic construct
  source 1..125: mol_type = other RNA
ttgccaagtgttccagccacgttttagagctagaaatagcaagttaaaataaggctagtccgttatcaacttgaaaaagtggcaccgagtcggtgcttgccctgggaaggtggctggaacacttg

SEQ ID NO: 3589 - RNA, 125 nt, synthetic construct
  source 1..125: mol_type = other RNA
ttgccaagtgttccagccacgttttagagctagaaatagcaagttaaaataaggctagtccgttatcaacttgaaaaagtggcaccgagtcggtgcttgccctggggaggtggctggaacacttg

SEQ ID NO: 3590 - RNA, 125 nt, synthetic construct
  source 1..125: mol_type = other RNA
ttgccaagtgttccagccacgttttagagctagaaatagcaagttaaaataaggctagtccgttatcaacttgaaaaagtggcaccgagtcggtgcttcattgccctggggaggtggctggaaca

SEQ ID NO: 3591 - RNA, 125 nt, synthetic construct
  source 1..125: mol_type = other RNA
ttgccaagtgttccagccacgttttagagctagaaatagcaagttaaaataaggctagtccgttatcaacttgaaaaagtggcaccgagtcggtgcttgccctgggtaggtggctggaacacttg

SEQ ID NO: 3592 - RNA, 125 nt, synthetic construct
  source 1..125: mol_type = other RNA
ttgccaagtgttccagccacgttttagagctagaaatagcaagttaaaataaggctagtccgttatcaacttgaaaaagtggcaccgagtcggtgctgccctgggtcggtggctggaacacttgg

SEQ ID NO: 3593 - RNA, 125 nt, synthetic construct
  source 1..125: mol_type = other RNA
ttgccaagtgttccagccacgttttagagctagaaatagcaagttaaaataaggctagtccgttatcaacttgaaaaagtggcaccgagtcggtgcattgccctggggaggtggctggaacactt

SEQ ID NO: 3594 - RNA, 125 nt, synthetic construct
  source 1..125: mol_type = other RNA
ttgccaagtgttccagccacgttttagagctagaaatagcaagttaaaataaggctagtccgttatcaacttgaaaaagtggcaccgagtcggtgcttcattgccctgggcaggtggctggaaca

SEQ ID NO: 3595 - RNA, 125 nt, synthetic construct
  source 1..125: mol_type = other RNA
ttgccaagtgttccagccacgttttagagctagaaatagcaagttaaaataaggctagtccgttatcaacttgaaaaagtggcaccgagtcggtgctcattgccctggggaggtggctggaacac

SEQ ID NO: 3596 - RNA, 125 nt, synthetic construct
  source 1..125: mol_type = other RNA
ttgccaagtgttccagccacgttttagagctagaaatagcaagttaaaataaggctagtccgttatcaacttgaaaaagtggcaccgagtcggtgctgccctgggccggtggctggaacacttgg

SEQ ID NO: 3597 - RNA, 125 nt, synthetic construct
  source 1..125: mol_type = other RNA
ttgccaagtgttccagccacgttttagagctagaaatagcaagttaaaataaggctagtccgttatcaacttgaaaaagtggcaccgagtcggtgctgccctgggaaggtggctggaacacttgg

SEQ ID NO: 3598 - RNA, 125 nt, synthetic construct
  source 1..125: mol_type = other RNA
ttgccaagtgttccagccacgttttagagctagaaatagcaagttaaaataaggctagtccgttatcaacttgaaaaagtggcaccgagtcggtgcttcattgccctgggaaggtggctggaaca

SEQ ID NO: 3599 - RNA, 125 nt, synthetic construct
  source 1..125: mol_type = other RNA
ttgccaagtgttccagccacgttttagagctagaaatagcaagttaaaataaggctagtccgttatcaacttgaaaaagtggcaccgagtcggtgcattgccctgggacggtggctggaacactt

SEQ ID NO: 3600 - RNA, 125 nt, synthetic construct
  source 1..125: mol_type = other RNA
ttgccaagtgttccagccacgttttagagctagaaatagcaagttaaaataaggctagtccgttatcaacttgaaaaagtggcaccgagtcggtgctcattgccctggggcggtggctggaacac

SEQ ID NO: 3601 - RNA, 125 nt, synthetic construct
  source 1..125: mol_type = other RNA
gttgccaagtgttccagccacgttttagagctagaaatagcaagttaaaataaggctagtccgttatcaacttgaaaaagtggcaccgagtcggtgctgggaaggtggctggaacactttttttt

SEQ ID NO: 3602 - RNA, 125 nt, synthetic construct
  source 1..125: mol_type = other RNA
ttgccaagtgttccagccacgttttagagctagaaatagcaagttaaaataaggctagtccgttatcaacttgaaaaagtggcaccgagtcggtgctcattgccctgggcaggtggctggaacac

SEQ ID NO: 3603 - RNA, 125 nt, synthetic construct
  source 1..125: mol_type = other RNA
ttgccaagtgttccagccacgttttagagctagaaatagcaagttaaaataaggctagtccgttatcaacttgaaaaagtggcaccgagtcggtgctgccctgggacggtggctggaacacttgg

SEQ ID NO: 3604 - RNA, 125 nt, synthetic construct
  source 1..125: mol_type = other RNA
ttgccaagtgttccagccacgttttagagctagaaatagcaagttaaaataaggctagtccgttatcaacttgaaaaagtggcaccgagtcggtgcattgccctggggcggtggctggaacactt

SEQ ID NO: 3605 - RNA, 125 nt, synthetic construct
  source 1..125: mol_type = other RNA
ttgccaagtgttccagccacgttttagagctagaaatagcaagttaaaataaggctagtccgttatcaacttgaaaaagtggcaccgagtcggtgctgccctggggaggtggctggaacacttgg

SEQ ID NO: 3606 - RNA, 125 nt, synthetic construct
  source 1..125: mol_type = other RNA
ttgccaagtgttccagccacgttttagagctagaaatagcaagttaaaataaggctagtccgttatcaacttgaaaaagtggcaccgagtcggtgcttcattgccctgggacggtggctggaaca

SEQ ID NO: 3607 - RNA, 125 nt, synthetic construct
  source 1..125: mol_type = other RNA
ttgccaagtgttccagccacgttttagagctagaaatagcaagttaaaataaggctagtccgttatcaacttgaaaaagtggcaccgagtcggtgctcattgccctgggtaggtggctggaacac

SEQ ID NO: 3608 - RNA, 125 nt, synthetic construct
  source 1..125: mol_type = other RNA
ttgccaagtgttccagccacgttttagagctagaaatagcaagttaaaataaggctagtccgttatcaacttgaaaaagtggcaccgagtcggtgctgccctgggcaggtggctggaacacttgg

SEQ ID NO: 3609 - RNA, 125 nt, synthetic construct
  source 1..125: mol_type = other RNA
ttgccaagtgttccagccacgttttagagctagaaatagcaagttaaaataaggctagtccgttatcaacttgaaaaagtggcaccgagtcggtgcattgccctgggaaggtggctggaacactt

SEQ ID NO: 3610 - RNA, 125 nt, synthetic construct
  source 1..125: mol_type = other RNA
gttgccaagtgttccagccacgttttagagctagaaatagcaagttaaaataaggctagtccgttatcaacttgaaaaagtggcaccgagtcggtgctgggcaggtggctggaacactttttttt

SEQ ID NO: 3611 - RNA, 125 nt, synthetic construct
  source 1..125: mol_type = other RNA
gttgccaagtgttccagccacgttttagagctagaaatagcaagttaaaataaggctagtccgttatcaacttgaaaaagtggcaccgagtcggtgctgggccggtggctggaacactttttttt

SEQ ID NO: 3612 - RNA, 125 nt, synthetic construct
  source 1..125: mol_type = other RNA
ttgccaagtgttccagccacgttttagagctagaaatagcaagttaaaataaggctagtccgttatcaacttgaaaaagtggcaccgagtcggtgctcattgccctgggaaggtggctggaacac

SEQ ID NO: 3613 - RNA, 125 nt, synthetic construct
  source 1..125: mol_type = other RNA
ttgccaagtgttccagccacgttttagagctagaaatagcaagttaaaataaggctagtccgttatcaacttgaaaaagtggcaccgagtcggtgctcattgccctgggccggtggctggaacac

SEQ ID NO: 3614 - RNA, 125 nt, synthetic construct
  source 1..125: mol_type = other RNA
gttgccaagtgttccagccacgttttagagctagaaatagcaagttaaaataaggctagtccgttatcaacttgaaaaagtggcaccgagtcggtgctgggacggtggctggaacactttttttt

SEQ ID NO: 3615 - RNA, 125 nt, synthetic construct
  source 1..125: mol_type = other RNA
gttgccaagtgttccagccacgttttagagctagaaatagcaagttaaaataaggctagtccgttatcaacttgaaaaagtggcaccgagtcggtgctgggtaggtggctggaacactttttttt

SEQ ID NO: 3616 - RNA, 125 nt, synthetic construct
  source 1..125: mol_type = other RNA
ttgccaagtgttccagccacgttttagagctagaaatagcaagttaaaataaggctagtccgttatcaacttgaaaaagtggcaccgagtcggtgcttcattgccctgggccggtggctggaaca

SEQ ID NO: 3617 - RNA, 125 nt, synthetic construct
  source 1..125: mol_type = other RNA
ttgccaagtgttccagccacgttttagagctagaaatagcaagttaaaataaggctagtccgttatcaacttgaaaaagtggcaccgagtcggtgcttcattgccctgggtcggtggctggaaca

SEQ ID NO: 3618 - RNA, 125 nt, synthetic construct
  source 1..125: mol_type = other RNA
ttgccaagtgttccagccacgttttagagctagaaatagcaagttaaaataaggctagtccgttatcaacttgaaaaagtggcaccgagtcggtgctgccctggggcggtggctggaacacttgg

SEQ ID NO: 3619 - RNA, 125 nt, synthetic construct
  source 1..125: mol_type = other RNA
ttgccaagtgttccagccacgttttagagctagaaatagcaagttaaaataaggctagtccgttatcaacttgaaaaagtggcaccgagtcggtgctgccctgggtaggtggctggaacacttgg

SEQ ID NO: 3620 - RNA, 125 nt, synthetic construct
  source 1..125: mol_type = other RNA
ttgccaagtgttccagccacgttttagagctagaaatagcaagttaaaataaggctagtccgttatcaacttgaaaaagtggcaccgagtcggtgctcattgccctgggtcggtggctggaacac

SEQ ID NO: 3621 - RNA, 125 nt, synthetic construct
  source 1..125: mol_type = other RNA
ttgccaagtgttccagccacgttttagagctagaaatagcaagttaaaataaggctagtccgttatcaacttgaaaaagtggcaccgagtcggtgcattgccctgggtcggtggctggaacactt

SEQ ID NO: 3622 - RNA, 125 nt, synthetic construct
  source 1..125: mol_type = other RNA
ttgccaagtgttccagccacgttttagagctagaaatagcaagttaaaataaggctagtccgttatcaacttgaaaaagtggcaccgagtcggtgcttcattgccctgggtaggtggctggaaca

SEQ ID NO: 3623 - RNA, 125 nt, synthetic construct
  source 1..125: mol_type = other RNA
ttgccaagtgttccagccacgttttagagctagaaatagcaagttaaaataaggctagtccgttatcaacttgaaaaagtggcaccgagtcggtgcttgccctgggtcggtggctggaacacttg

SEQ ID NO: 3624 - RNA, 125 nt, synthetic construct
  source 1..125: mol_type = other RNA
ttgccaagtgttccagccacgttttagagctagaaatagcaagttaaaataaggctagtccgttatcaacttgaaaaagtggcaccgagtcggtgcattgccctgggccggtggctggaacactt

SEQ ID NO: 3625 - RNA, 125 nt, synthetic construct
  source 1..125: mol_type = other RNA
ttgccaagtgttccagccacgttttagagctagaaatagcaagttaaaataaggctagtccgttatcaacttgaaaaagtggcaccgagtcggtgcattgccctgggtaggtggctggaacactt

SEQ ID NO: 3626 - RNA, 125 nt, synthetic construct
  source 1..125: mol_type = other RNA
ttgccaagtgttccagccacgttttagagctagaaatagcaagttaaaataaggctagtccgttatcaacttgaaaaagtggcaccgagtcggtgcattgccctgggcaggtggctggaacactt

SEQ ID NO: 3627 - RNA, 125 nt, synthetic construct
  source 1..125: mol_type = other RNA
ttgccaagtgttccagccacgttttagagctagaaatagcaagttaaaataaggctagtccgttatcaacttgaaaaagtggcaccgagtcggtgcttgccctggggcggtggctggaacacttg

SEQ ID NO: 3628 - RNA, 126 nt, synthetic construct
  source 1..126: mol_type = other RNA
ttgccaagtgttccagccacgttttagagctagaaatagcaagttaaaataaggctagtccgttatcaacttgaaaaagtggcaccgagtcggtgcttgccctgggacggtggctggaacacttgg

SEQ ID NO: 3629 - RNA, 126 nt, synthetic construct
  source 1..126: mol_type = other RNA
ttgccaagtgttccagccacgttttagagctagaaatagcaagttaaaataaggctagtccgttatcaacttgaaaaagtggcaccgagtcggtgctcattgccctggggaggtggctggaacact

SEQ ID NO: 3630 - RNA, 126 nt, synthetic construct
  source 1..126: mol_type = other RNA
gttgccaagtgttccagccacgttttagagctagaaatagcaagttaaaataaggctagtccgttatcaacttgaaaaagtggcaccgagtcggtgctgggaaggtggctggaacacttttttttt

SEQ ID NO: 3631 - RNA, 126 nt, synthetic construct
  source 1..126: mol_type = other RNA
gttgccaagtgttccagccacgttttagagctagaaatagcaagttaaaataaggctagtccgttatcaacttgaaaaagtggcaccgagtcggtgctgggtcggtggctggaacacttttttttt

SEQ ID NO: 3632 - RNA, 126 nt, synthetic construct
  source 1..126: mol_type = other RNA
ttgccaagtgttccagccacgttttagagctagaaatagcaagttaaaataaggctagtccgttatcaacttgaaaaagtggcaccgagtcggtgcattgccctggggcggtggctggaacacttg

SEQ ID NO: 3633 - RNA, 126 nt, synthetic construct
  source 1..126: mol_type = other RNA
ttgccaagtgttccagccacgttttagagctagaaatagcaagttaaaataaggctagtccgttatcaacttgaaaaagtggcaccgagtcggtgctcattgccctgggaaggtggctggaacact

SEQ ID NO: 3634 - RNA, 126 nt, synthetic construct
  source 1..126: mol_type = other RNA
ttgccaagtgttccagccacgttttagagctagaaatagcaagttaaaataaggctagtccgttatcaacttgaaaaagtggcaccgagtcggtgcttcattgccctgggcaggtggctggaacac

SEQ ID NO: 3635 - RNA, 126 nt, synthetic construct
  source 1..126: mol_type = other RNA
gttgccaagtgttccagccacgttttagagctagaaatagcaagttaaaataaggctagtccgttatcaacttgaaaaagtggcaccgagtcggtgcgccctgggtcggtggctggaacttttttt

SEQ ID NO: 3636 - RNA, 126 nt, synthetic construct
  source 1..126: mol_type = other RNA
ttgccaagtgttccagccacgttttagagctagaaatagcaagttaaaataaggctagtccgttatcaacttgaaaaagtggcaccgagtcggtgcttcattgccctgggtcggtggctggaacac

SEQ ID NO: 3637 - RNA, 126 nt, synthetic construct
  source 1..126: mol_type = other RNA
ttgccaagtgttccagccacgttttagagctagaaatagcaagttaaaataaggctagtccgttatcaacttgaaaaagtggcaccgagtcggtgcattgccctgggaaggtggctggaacacttg

SEQ ID NO: 3638 - RNA, 126 nt, synthetic construct
  source 1..126: mol_type = other RNA
ttgccaagtgttccagccacgttttagagctagaaatagcaagttaaaataaggctagtccgttatcaacttgaaaaagtggcaccgagtcggtgcttgccctgggtcggtggctggaacacttgg

SEQ ID NO: 3639 - RNA, 126 nt, synthetic construct
  source 1..126: mol_type = other RNA
gttgccaagtgttccagccacgttttagagctagaaatagcaagttaaaataaggctagtccgttatcaacttgaaaaagtggcaccgagtcggtgcgccctgggacggtggctggaacttttttt

SEQ ID NO: 3640 - RNA, 126 nt, synthetic construct
  source 1..126: mol_type = other RNA
ttgccaagtgttccagccacgttttagagctagaaatagcaagttaaaataaggctagtccgttatcaacttgaaaaagtggcaccgagtcggtgcttcattgccctgggaaggtggctggaacac

SEQ ID NO: 3641 - RNA, 126 nt, synthetic construct
  source 1..126: mol_type = other RNA
gttgccaagtgttccagccacgttttagagctagaaatagcaagttaaaataaggctagtccgttatcaacttgaaaaagtggcaccgagtcggtgctgggccggtggctggaacacttttttttt

SEQ ID NO: 3642 - RNA, 126 nt, synthetic construct
  source 1..126: mol_type = other RNA
ttgccaagtgttccagccacgttttagagctagaaatagcaagttaaaataaggctagtccgttatcaacttgaaaaagtggcaccgagtcggtgctcattgccctgggccggtggctggaacact

SEQ ID NO: 3643 - RNA, 126 nt, synthetic construct
  source 1..126: mol_type = other RNA
ttgccaagtgttccagccacgttttagagctagaaatagcaagttaaaataaggctagtccgttatcaacttgaaaaagtggcaccgagtcggtgcttgccctgggtaggtggctggaacacttgg

SEQ ID NO: 3644 - RNA, 126 nt, synthetic construct
  source 1..126: mol_type = other RNA
gttgccaagtgttccagccacgttttagagctagaaatagcaagttaaaataaggctagtccgttatcaacttgaaaaagtggcaccgagtcggtgctgggacggtggctggaacacttttttttt

SEQ ID NO: 3645 - RNA, 126 nt, synthetic construct
  source 1..126: mol_type = other RNA
ttgccaagtgttccagccacgttttagagctagaaatagcaagttaaaataaggctagtccgttatcaacttgaaaaagtggcaccgagtcggtgcattgccctgggtaggtggctggaacacttg

SEQ ID NO: 3646 - RNA, 126 nt, synthetic construct
  source 1..126: mol_type = other RNA
ttgccaagtgttccagccacgttttagagctagaaatagcaagttaaaataaggctagtccgttatcaacttgaaaaagtggcaccgagtcggtgctcattgccctggggcggtggctggaacact

SEQ ID NO: 3647 - RNA, 126 nt, synthetic construct
  source 1..126: mol_type = other RNA
ttgccaagtgttccagccacgttttagagctagaaatagcaagttaaaataaggctagtccgttatcaacttgaaaaagtggcaccgagtcggtgcattgccctgggcaggtggctggaacacttg

SEQ ID NO: 3648 - RNA, 126 nt, synthetic construct
  source 1..126: mol_type = other RNA
ttgccaagtgttccagccacgttttagagctagaaatagcaagttaaaataaggctagtccgttatcaacttgaaaaagtggcaccgagtcggtgctcattgccctgggacggtggctggaacact

SEQ ID NO: 3649 - RNA, 126 nt, synthetic construct
  source 1..126: mol_type = other RNA
ttgccaagtgttccagccacgttttagagctagaaatagcaagttaaaataaggctagtccgttatcaacttgaaaaagtggcaccgagtcggtgcttcattgccctgggtaggtggctggaacac

SEQ ID NO: 3650 - RNA, 126 nt, synthetic construct
  source 1..126: mol_type = other RNA
ttgccaagtgttccagccacgttttagagctagaaatagcaagttaaaataaggctagtccgttatcaacttgaaaaagtggcaccgagtcggtgcttcattgccctgggacggtggctggaacac

SEQ ID NO: 3651 - RNA, 126 nt, synthetic construct
  source 1..126: mol_type = other RNA
gttgccaagtgttccagccacgttttagagctagaaatagcaagttaaaataaggctagtccgttatcaacttgaaaaagtggcaccgagtcggtgcgccctgggcaggtggctggaacttttttt

SEQ ID NO: 3652 - RNA, 126 nt, synthetic construct
  source 1..126: mol_type = other RNA
gttgccaagtgttccagccacgttttagagctagaaatagcaagttaaaataaggctagtccgttatcaacttgaaaaagtggcaccgagtcggtgcgccctgggtaggtggctggaacttttttt

SEQ ID NO: 3653 - RNA, 126 nt, synthetic construct
  source 1..126: mol_type = other RNA
ttgccaagtgttccagccacgttttagagctagaaatagcaagttaaaataaggctagtccgttatcaacttgaaaaagtggcaccgagtcggtgcttgccctgggcaggtggctggaacacttgg

SEQ ID NO: 3654 - RNA, 126 nt, synthetic construct
  source 1..126: mol_type = other RNA
ttgccaagtgttccagccacgttttagagctagaaatagcaagttaaaataaggctagtccgttatcaacttgaaaaagtggcaccgagtcggtgctcattgccctgggtaggtggctggaacact

SEQ ID NO: 3655 - RNA, 126 nt, synthetic construct
  source 1..126: mol_type = other RNA
gttgccaagtgttccagccacgttttagagctagaaatagcaagttaaaataaggctagtccgttatcaacttgaaaaagtggcaccgagtcggtgcgccctggggcggtggctggaacttttttt

SEQ ID NO: 3656 - RNA, 126 nt, synthetic construct
  source 1..126: mol_type = other RNA
ttgccaagtgttccagccacgttttagagctagaaatagcaagttaaaataaggctagtccgttatcaacttgaaaaagtggcaccgagtcggtgcattgccctgggacggtggctggaacacttg

SEQ ID NO: 3657 - RNA, 126 nt, synthetic construct
  source 1..126: mol_type = other RNA
ttgccaagtgttccagccacgttttagagctagaaatagcaagttaaaataaggctagtccgttatcaacttgaaaaagtggcaccgagtcggtgcttgccctgggccggtggctggaacacttgg

SEQ ID NO: 3658 - RNA, 126 nt, synthetic construct
  source 1..126: mol_type = other RNA
ttgccaagtgttccagccacgttttagagctagaaatagcaagttaaaataaggctagtccgttatcaacttgaaaaagtggcaccgagtcggtgcattgccctgggccggtggctggaacacttg

SEQ ID NO: 3659 - RNA, 126 nt, synthetic construct
  source 1..126: mol_type = other RNA
gttgccaagtgttccagccacgttttagagctagaaatagcaagttaaaataaggctagtccgttatcaacttgaaaaagtggcaccgagtcggtgcgccctgggccggtggctggaacttttttt

SEQ ID NO: 3660 - RNA, 126 nt, synthetic construct
  source 1..126: mol_type = other RNA
ttgccaagtgttccagccacgttttagagctagaaatagcaagttaaaataaggctagtccgttatcaacttgaaaaagtggcaccgagtcggtgcttcattgccctggggcggtggctggaacac

SEQ ID NO: 3661 - RNA, 126 nt, synthetic construct
  source 1..126: mol_type = other RNA
ttgccaagtgttccagccacgttttagagctagaaatagcaagttaaaataaggctagtccgttatcaacttgaaaaagtggcaccgagtcggtgcttgccctggggaggtggctggaacacttgg

SEQ ID NO: 3662 - RNA, 126 nt, synthetic construct
  source 1..126: mol_type = other RNA
ttgccaagtgttccagccacgttttagagctagaaatagcaagttaaaataaggctagtccgttatcaacttgaaaaagtggcaccgagtcggtgcttcattgccctggggaggtggctggaacac

SEQ ID NO: 3663 - RNA, 126 nt, synthetic construct
  source 1..126: mol_type = other RNA
ttgccaagtgttccagccacgttttagagctagaaatagcaagttaaaataaggctagtccgttatcaacttgaaaaagtggcaccgagtcggtgcttgccctgggaaggtggctggaacacttgg

SEQ ID NO: 3664 - RNA, 126 nt, synthetic construct
  source 1..126: mol_type = other RNA
ttgccaagtgttccagccacgttttagagctagaaatagcaagttaaaataaggctagtccgttatcaacttgaaaaagtggcaccgagtcggtgcttgccctggggcggtggctggaacacttgg

SEQ ID NO: 3665 - RNA, 126 nt, synthetic construct
  source 1..126: mol_type = other RNA
ttgccaagtgttccagccacgttttagagctagaaatagcaagttaaaataaggctagtccgttatcaacttgaaaaagtggcaccgagtcggtgctcattgccctgggtcggtggctggaacact

SEQ ID NO: 3666 - RNA, 126 nt, synthetic construct
  source 1..126: mol_type = other RNA
gttgccaagtgttccagccacgttttagagctagaaatagcaagttaaaataaggctagtccgttatcaacttgaaaaagtggcaccgagtcggtgctggggaggtggctggaacacttttttttt

SEQ ID NO: 3667 - RNA, 126 nt, synthetic construct
  source 1..126: mol_type = other RNA
gttgccaagtgttccagccacgttttagagctagaaatagcaagttaaaataaggctagtccgttatcaacttgaaaaagtggcaccgagtcggtgcgccctggggaggtggctggaacttttttt

SEQ ID NO: 3668 - RNA, 126 nt, synthetic construct
  source 1..126: mol_type = other RNA
ttgccaagtgttccagccacgttttagagctagaaatagcaagttaaaataaggctagtccgttatcaacttgaaaaagtggcaccgagtcggtgcttcattgccctgggccggtggctggaacac

SEQ ID NO: 3669 - RNA, 126 nt, synthetic construct
  source 1..126: mol_type = other RNA
gttgccaagtgttccagccacgttttagagctagaaatagcaagttaaaataaggctagtccgttatcaacttgaaaaagtggcaccgagtcggtgcgccctgggaaggtggctggaacttttttt

SEQ ID NO: 3670 - RNA, 126 nt, synthetic construct
  source 1..126: mol_type = other RNA
ttgccaagtgttccagccacgttttagagctagaaatagcaagttaaaataaggctagtccgttatcaacttgaaaaagtggcaccgagtcggtgctcattgccctgggcaggtggctggaacact

SEQ ID NO: 3671 - RNA, 126 nt, synthetic construct
  source 1..126: mol_type = other RNA
gttgccaagtgttccagccacgttttagagctagaaatagcaagttaaaataaggctagtccgttatcaacttgaaaaagtggcaccgagtcggtgctgggcaggtggctggaacacttttttttt

SEQ ID NO: 3672 - RNA, 126 nt, synthetic construct
  source 1..126: mol_type = other RNA
gttgccaagtgttccagccacgttttagagctagaaatagcaagttaaaataaggctagtccgttatcaacttgaaaaagtggcaccgagtcggtgctgggtaggtggctggaacacttttttttt

SEQ ID NO: 3673 - RNA, 126 nt, synthetic construct
  source 1..126: mol_type = other RNA
gttgccaagtgttccagccacgttttagagctagaaatagcaagttaaaataaggctagtccgttatcaacttgaaaaagtggcaccgagtcggtgctggggcggtggctggaacacttttttttt

SEQ ID NO: 3674 - RNA, 126 nt, synthetic construct
  source 1..126: mol_type = other RNA
ttgccaagtgttccagccacgttttagagctagaaatagcaagttaaaataaggctagtccgttatcaacttgaaaaagtggcaccgagtcggtgcattgccctgggtcggtggctggaacacttg

SEQ ID NO: 3675 - RNA, 126 nt, synthetic construct
  source 1..126: mol_type = other RNA
ttgccaagtgttccagccacgttttagagctagaaatagcaagttaaaataaggctagtccgttatcaacttgaaaaagtggcaccgagtcggtgcattgccctggggaggtggctggaacacttg

SEQ ID NO: 3676 - RNA, 127 nt, synthetic construct
  source 1..127: mol_type = other RNA
gttgccaagtgttccagccacgttttagagctagaaatagcaagttaaaataaggctagtccgttatcaacttgaaaaagtggcaccgagtcggtgctgccctgggcaggtggctggaacttttttt

SEQ ID NO: 3677 - RNA, 127 nt, synthetic construct
  source 1..127: mol_type = other RNA
ttgccaagtgttccagccacgttttagagctagaaatagcaagttaaaataaggctagtccgttatcaacttgaaaaagtggcaccgagtcggtgctcattgccctgggtcggtggctggaacactt

SEQ ID NO: 3678 - RNA, 127 nt, synthetic construct
  source 1..127: mol_type = other RNA
ttgccaagtgttccagccacgttttagagctagaaatagcaagttaaaataaggctagtccgttatcaacttgaaaaagtggcaccgagtcggtgctcattgccctgggtaggtggctggaacactt

SEQ ID NO: 3679 - RNA, 127 nt, synthetic construct
  source 1..127: mol_type = other RNA
ttgccaagtgttccagccacgttttagagctagaaatagcaagttaaaataaggctagtccgttatcaacttgaaaaagtggcaccgagtcggtgcattgccctgggtaggtggctggaacacttgg

SEQ ID NO: 3680 - RNA, 127 nt, synthetic construct
  source 1..127: mol_type = other RNA
ttgccaagtgttccagccacgttttagagctagaaatagcaagttaaaataaggctagtccgttatcaacttgaaaaagtggcaccgagtcggtgcattgccctgggtcggtggctggaacacttgg

SEQ ID NO: 3681 - RNA, 127 nt, synthetic construct
  source 1..127: mol_type = other RNA
ttgccaagtgttccagccacgttttagagctagaaatagcaagttaaaataaggctagtccgttatcaacttgaaaaagtggcaccgagtcggtgcattgccctggggcggtggctggaacacttgg

SEQ ID NO: 3682 - RNA, 127 nt, synthetic construct
  source 1..127: mol_type = other RNA
ttgccaagtgttccagccacgttttagagctagaaatagcaagttaaaataaggctagtccgttatcaacttgaaaaagtggcaccgagtcggtgcattgccctgggaaggtggctggaacacttgg

SEQ ID NO: 3683 - RNA, 127 nt, synthetic construct
  source 1..127: mol_type = other RNA
gttgccaagtgttccagccacgttttagagctagaaatagcaagttaaaataaggctagtccgttatcaacttgaaaaagtggcaccgagtcggtgcgccctgggtcggtggctggaacattttttt

SEQ ID NO: 3684 - RNA, 127 nt, synthetic construct
  source 1..127: mol_type = other RNA
gttgccaagtgttccagccacgttttagagctagaaatagcaagttaaaataaggctagtccgttatcaacttgaaaaagtggcaccgagtcggtgctgggtcggtggctggaacacttgttttttt

SEQ ID NO: 3685 - RNA, 127 nt, synthetic construct
  source 1..127: mol_type = other RNA
gttgccaagtgttccagccacgttttagagctagaaatagcaagttaaaataaggctagtccgttatcaacttgaaaaagtggcaccgagtcggtgcgccctgggacggtggctggaacattttttt

SEQ ID NO: 3686 - RNA, 127 nt, synthetic construct
  source 1..127: mol_type = other RNA
gttgccaagtgttccagccacgttttagagctagaaatagcaagttaaaataaggctagtccgttatcaacttgaaaaagtggcaccgagtcggtgcgccctgggaaggtggctggaacattttttt

SEQ ID NO: 3687 - RNA, 127 nt, synthetic construct
  source 1..127: mol_type = other RNA
ttgccaagtgttccagccacgttttagagctagaaatagcaagttaaaataaggctagtccgttatcaacttgaaaaagtggcaccgagtcggtgcattgccctgggccggtggctggaacacttgg

SEQ ID NO: 3688 - RNA, 127 nt, synthetic construct
  source 1..127: mol_type = other RNA
gttgccaagtgttccagccacgttttagagctagaaatagcaagttaaaataaggctagtccgttatcaacttgaaaaagtggcaccgagtcggtgcgccctggggaggtggctggaacattttttt

SEQ ID NO: 3689 - RNA, 127 nt, synthetic construct
  source 1..127: mol_type = other RNA
gttgccaagtgttccagccacgttttagagctagaaatagcaagttaaaataaggctagtccgttatcaacttgaaaaagtggcaccgagtcggtgctggggaggtggctggaacacttgttttttt

SEQ ID NO: 3690 - RNA, 127 nt, synthetic construct
  source 1..127: mol_type = other RNA
gttgccaagtgttccagccacgttttagagctagaaatagcaagttaaaataaggctagtccgttatcaacttgaaaaagtggcaccgagtcggtgcgccctggggcggtggctggaacattttttt

SEQ ID NO: 3691 - RNA, 127 nt, synthetic construct
  source 1..127: mol_type = other RNA
gttgccaagtgttccagccacgttttagagctagaaatagcaagttaaaataaggctagtccgttatcaacttgaaaaagtggcaccgagtcggtgctgggtaggtggctggaacacttgttttttt

SEQ ID NO: 3692 - RNA, 127 nt, synthetic construct
  source 1..127: mol_type = other RNA
gttgccaagtgttccagccacgttttagagctagaaatagcaagttaaaataaggctagtccgttatcaacttgaaaaagtggcaccgagtcggtgctgggcaggtggctggaacacttgttttttt

SEQ ID NO: 3693 - RNA, 127 nt, synthetic construct
  source 1..127: mol_type = other RNA
gttgccaagtgttccagccacgttttagagctagaaatagcaagttaaaataaggctagtccgttatcaacttgaaaaagtggcaccgagtcggtgctgggaaggtggctggaacacttgttttttt

SEQ ID NO: 3694 - RNA, 127 nt, synthetic construct
  source 1..127: mol_type = other RNA
gttgccaagtgttccagccacgttttagagctagaaatagcaagttaaaataaggctagtccgttatcaacttgaaaaagtggcaccgagtcggtgctgccctgggtcggtggctggaacttttttt

SEQ ID NO: 3695 - RNA, 127 nt, synthetic construct
  source 1..127: mol_type = other RNA
gttgccaagtgttccagccacgttttagagctagaaatagcaagttaaaataaggctagtccgttatcaacttgaaaaagtggcaccgagtcggtgcgccctgggccggtggctggaacattttttt

SEQ ID NO: 3696 - RNA, 127 nt, synthetic construct
  source 1..127: mol_type = other RNA
gttgccaagtgttccagccacgttttagagctagaaatagcaagttaaaataaggctagtccgttatcaacttgaaaaagtggcaccgagtcggtgctgccctggggcggtggctggaacttttttt

SEQ ID NO: 3697 - RNA, 127 nt, synthetic construct
  source 1..127: mol_type = other RNA
gttgccaagtgttccagccacgttttagagctagaaatagcaagttaaaataaggctagtccgttatcaacttgaaaaagtggcaccgagtcggtgctgccctggggaggtggctggaacttttttt

SEQ ID NO: 3698 - RNA, 127 nt, synthetic construct
  source 1..127: mol_type = other RNA
gttgccaagtgttccagccacgttttagagctagaaatagcaagttaaaataaggctagtccgttatcaacttgaaaaagtggcaccgagtcggtgctgccctgggccggtggctggaacttttttt

SEQ ID NO: 3699 - RNA, 127 nt, synthetic construct
  source 1..127: mol_type = other RNA
gttgccaagtgttccagccacgttttagagctagaaatagcaagttaaaataaggctagtccgttatcaacttgaaaaagtggcaccgagtcggtgctgccctgggtaggtggctggaacttttttt

SEQ ID NO: 3700 - RNA, 127 nt, synthetic construct
  source 1..127: mol_type = other RNA
ttgccaagtgttccagccacgttttagagctagaaatagcaagttaaaataaggctagtccgttatcaacttgaaaaagtggcaccgagtcggtgcattgccctgggcaggtggctggaacacttgg

SEQ ID NO: 3701 - RNA, 127 nt, synthetic construct
  source 1..127: mol_type = other RNA
ttgccaagtgttccagccacgttttagagctagaaatagcaagttaaaataaggctagtccgttatcaacttgaaaaagtggcaccgagtcggtgcttcattgccctgggccggtggctggaacact

SEQ ID NO: 3702 - RNA, 127 nt, synthetic construct
  source 1..127: mol_type = other RNA
ttgccaagtgttccagccacgttttagagctagaaatagcaagttaaaataaggctagtccgttatcaacttgaaaaagtggcaccgagtcggtgctcattgccctggggaggtggctggaacactt

SEQ ID NO: 3703 - RNA, 127 nt, synthetic construct
  source 1..127: mol_type = other RNA
ttgccaagtgttccagccacgttttagagctagaaatagcaagttaaaataaggctagtccgttatcaacttgaaaaagtggcaccgagtcggtgctcattgccctgggaaggtggctggaacactt

SEQ ID NO: 3704 - RNA, 127 nt, synthetic construct
  source 1..127: mol_type = other RNA
ttgccaagtgttccagccacgttttagagctagaaatagcaagttaaaataaggctagtccgttatcaacttgaaaaagtggcaccgagtcggtgcttcattgccctgggaaggtggctggaacact

SEQ ID NO: 3705 - RNA, 127 nt, synthetic construct
  source 1..127: mol_type = other RNA
ttgccaagtgttccagccacgttttagagctagaaatagcaagttaaaataaggctagtccgttatcaacttgaaaaagtggcaccgagtcggtgcttcattgccctggggcggtggctggaacact

SEQ ID NO: 3706 - RNA, 127 nt, synthetic construct
  source 1..127: mol_type = other RNA
ttgccaagtgttccagccacgttttagagctagaaatagcaagttaaaataaggctagtccgttatcaacttgaaaaagtggcaccgagtcggtgcttcattgccctgggacggtggctggaacact

SEQ ID NO: 3707 - RNA, 127 nt, synthetic construct
  source 1..127: mol_type = other RNA
ttgccaagtgttccagccacgttttagagctagaaatagcaagttaaaataaggctagtccgttatcaacttgaaaaagtggcaccgagtcggtgcttcattgccctggggaggtggctggaacact

SEQ ID NO: 3708 - RNA, 127 nt, synthetic construct
  source 1..127: mol_type = other RNA
ttgccaagtgttccagccacgttttagagctagaaatagcaagttaaaataaggctagtccgttatcaacttgaaaaagtggcaccgagtcggtgcttcattgccctgggtcggtggctggaacact

SEQ ID NO: 3709 - RNA, 127 nt, synthetic construct
  source 1..127: mol_type = other RNA
ttgccaagtgttccagccacgttttagagctagaaatagcaagttaaaataaggctagtccgttatcaacttgaaaaagtggcaccgagtcggtgcttcattgccctgggcaggtggctggaacact

SEQ ID NO: 3710 - RNA, 127 nt, synthetic construct
  source 1..127: mol_type = other RNA
ttgccaagtgttccagccacgttttagagctagaaatagcaagttaaaataaggctagtccgttatcaacttgaaaaagtggcaccgagtcggtgcattgccctggggaggtggctggaacacttgg

SEQ ID NO: 3711 - RNA, 127 nt, synthetic construct
  source 1..127: mol_type = other RNA
ttgccaagtgttccagccacgttttagagctagaaatagcaagttaaaataaggctagtccgttatcaacttgaaaaagtggcaccgagtcggtgctcattgccctgggcaggtggctggaacactt

SEQ ID NO: 3712 - RNA, 127 nt, synthetic construct
  source 1..127: mol_type = other RNA
ttgccaagtgttccagccacgttttagagctagaaatagcaagttaaaataaggctagtccgttatcaacttgaaaaagtggcaccgagtcggtgcattgccctgggacggtggctggaacacttgg

SEQ ID NO: 3713 - RNA, 127 nt, synthetic construct
  source 1..127: mol_type = other RNA
ttgccaagtgttccagccacgttttagagctagaaatagcaagttaaaataaggctagtccgttatcaacttgaaaaagtggcaccgagtcggtgctcattgccctgggacggtggctggaacactt

SEQ ID NO: 3714 - RNA, 127 nt, synthetic construct
  source 1..127: mol_type = other RNA
ttgccaagtgttccagccacgttttagagctagaaatagcaagttaaaataaggctagtccgttatcaacttgaaaaagtggcaccgagtcggtgctcattgccctgggccggtggctggaacactt

SEQ ID NO: 3715 - RNA, 127 nt, synthetic construct
  source 1..127: mol_type = other RNA
ttgccaagtgttccagccacgttttagagctagaaatagcaagttaaaataaggctagtccgttatcaacttgaaaaagtggcaccgagtcggtgcttcattgccctgggtaggtggctggaacact

SEQ ID NO: 3716 - RNA, 127 nt, synthetic construct
  source 1..127: mol_type = other RNA
gttgccaagtgttccagccacgttttagagctagaaatagcaagttaaaataaggctagtccgttatcaacttgaaaaagtggcaccgagtcggtgctgccctgggaaggtggctggaacttttttt

SEQ ID NO: 3717 - RNA, 127 nt, synthetic construct
  source 1..127: mol_type = other RNA
ttgccaagtgttccagccacgttttagagctagaaatagcaagttaaaataaggctagtccgttatcaacttgaaaaagtggcaccgagtcggtgctcattgccctggggcggtggctggaacactt

SEQ ID NO: 3718 - RNA, 127 nt, synthetic construct
  source 1..127: mol_type = other RNA
gttgccaagtgttccagccacgttttagagctagaaatagcaagttaaaataaggctagtccgttatcaacttgaaaaagtggcaccgagtcggtgctgccctgggacggtggctggaacttttttt

SEQ ID NO: 3719 - RNA, 127 nt, synthetic construct
  source 1..127: mol_type = other RNA
gttgccaagtgttccagccacgttttagagctagaaatagcaagttaaaataaggctagtccgttatcaacttgaaaaagtggcaccgagtcggtgctgggacggtggctggaacacttgttttttt

SEQ ID NO: 3720 - RNA, 127 nt, synthetic construct
  source 1..127: mol_type = other RNA
gttgccaagtgttccagccacgttttagagctagaaatagcaagttaaaataaggctagtccgttatcaacttgaaaaagtggcaccgagtcggtgcgccctgggcaggtggctggaacattttttt

SEQ ID NO: 3721 - RNA, 127 nt, synthetic construct
  source 1..127: mol_type = other RNA
gttgccaagtgttccagccacgttttagagctagaaatagcaagttaaaataaggctagtccgttatcaacttgaaaaagtggcaccgagtcggtgctggggcggtggctggaacacttgttttttt

SEQ ID NO: 3722 - RNA, 127 nt, synthetic construct
  source 1..127: mol_type = other RNA
gttgccaagtgttccagccacgttttagagctagaaatagcaagttaaaataaggctagtccgttatcaacttgaaaaagtggcaccgagtcggtgctgggccggtggctggaacacttgttttttt

SEQ ID NO: 3723 - RNA, 127 nt, synthetic construct
  source 1..127: mol_type = other RNA
gttgccaagtgttccagccacgttttagagctagaaatagcaagttaaaataaggctagtccgttatcaacttgaaaaagtggcaccgagtcggtgcgccctgggtaggtggctggaacattttttt

SEQ ID NO: 3724 - RNA, 128 nt, synthetic construct
  source 1..128: mol_type = other RNA
ttgccaagtgttccagccacgttttagagctagaaatagcaagttaaaataaggctagtccgttatcaacttgaaaaagtggcaccgagtcggtgcttcattgccctggggaggtggctggaacactt

SEQ ID NO: 3725 - RNA, 128 nt, synthetic construct
  source 1..128: mol_type = other RNA
ttgccaagtgttccagccacgttttagagctagaaatagcaagttaaaataaggctagtccgttatcaacttgaaaaagtggcaccgagtcggtgcttcattgccctgggtaggtggctggaacactt

SEQ ID NO: 3726 - RNA, 128 nt, synthetic construct
  source 1..128: mol_type = other RNA
gttgccaagtgttccagccacgttttagagctagaaatagcaagttaaaataaggctagtccgttatcaacttgaaaaagtggcaccgagtcggtgctgccctgggacggtggctggaacattttttt

SEQ ID NO: 3727 - RNA, 128 nt, synthetic construct
  source 1..128: mol_type = other RNA
gttgccaagtgttccagccacgttttagagctagaaatagcaagttaaaataaggctagtccgttatcaacttgaaaaagtggcaccgagtcggtgcttgccctgggtcggtggctggaacttttttt

SEQ ID NO: 3728 - RNA, 128 nt, synthetic construct
  source 1..128: mol_type = other RNA
ttgccaagtgttccagccacgttttagagctagaaatagcaagttaaaataaggctagtccgttatcaacttgaaaaagtggcaccgagtcggtgctcattgccctgggcaggtggctggaacacttg

SEQ ID NO: 3729 - RNA, 128 nt, synthetic construct
  source 1..128: mol_type = other RNA
gttgccaagtgttccagccacgttttagagctagaaatagcaagttaaaataaggctagtccgttatcaacttgaaaaagtggcaccgagtcggtgctgggccggtggctggaacacttggttttttt

SEQ ID NO: 3730 - RNA, 128 nt, synthetic construct
  source 1..128: mol_type = other RNA
gttgccaagtgttccagccacgttttagagctagaaatagcaagttaaaataaggctagtccgttatcaacttgaaaaagtggcaccgagtcggtgctgccctgggccggtggctggaacattttttt

SEQ ID NO: 3731 - RNA, 128 nt, synthetic construct
  source 1..128: mol_type = other RNA
gttgccaagtgttccagccacgttttagagctagaaatagcaagttaaaataaggctagtccgttatcaacttgaaaaagtggcaccgagtcggtgcttgccctgggcaggtggctggaacttttttt

SEQ ID NO: 3732 - RNA, 128 nt, synthetic construct
  source 1..128: mol_type = other RNA
gttgccaagtgttccagccacgttttagagctagaaatagcaagttaaaataaggctagtccgttatcaacttgaaaaagtggcaccgagtcggtgcttgccctggggaggtggctggaacttttttt

SEQ ID NO: 3733 - RNA, 128 nt, synthetic construct
  source 1..128: mol_type = other RNA
ttgccaagtgttccagccacgttttagagctagaaatagcaagttaaaataaggctagtccgttatcaacttgaaaaagtggcaccgagtcggtgctcattgccctgggacggtggctggaacacttg

SEQ ID NO: 3734 - RNA, 128 nt, synthetic construct
  source 1..128: mol_type = other RNA
ttgccaagtgttccagccacgttttagagctagaaatagcaagttaaaataaggctagtccgttatcaacttgaaaaagtggcaccgagtcggtgctcattgccctgggccggtggctggaacacttg

SEQ ID NO: 3735 - RNA, 128 nt, synthetic construct
  source 1..128: mol_type = other RNA
ttgccaagtgttccagccacgttttagagctagaaatagcaagttaaaataaggctagtccgttatcaacttgaaaaagtggcaccgagtcggtgcttcattgccctgggccggtggctggaacactt

SEQ ID NO: 3736 - RNA, 128 nt, synthetic construct
  source 1..128: mol_type = other RNA
ttgccaagtgttccagccacgttttagagctagaaatagcaagttaaaataaggctagtccgttatcaacttgaaaaagtggcaccgagtcggtgctcattgccctgggtaggtggctggaacacttg

SEQ ID NO: 3737 - RNA, 128 nt, synthetic construct
  source 1..128: mol_type = other RNA
gttgccaagtgttccagccacgttttagagctagaaatagcaagttaaaataaggctagtccgttatcaacttgaaaaagtggcaccgagtcggtgcgccctgggtaggtggctggaacacttttttt

SEQ ID NO: 3738 - RNA, 128 nt, synthetic construct
  source 1..128: mol_type = other RNA
ttgccaagtgttccagccacgttttagagctagaaatagcaagttaaaataaggctagtccgttatcaacttgaaaaagtggcaccgagtcggtgcttcattgccctgggtcggtggctggaacactt

SEQ ID NO: 3739 - RNA, 128 nt, synthetic construct
  source 1..128: mol_type = other RNA
ttgccaagtgttccagccacgttttagagctagaaatagcaagttaaaataaggctagtccgttatcaacttgaaaaagtggcaccgagtcggtgcttcattgccctgggcaggtggctggaacactt

SEQ ID NO: 3740 - RNA, 128 nt, synthetic construct
  source 1..128: mol_type = other RNA
ttgccaagtgttccagccacgttttagagctagaaatagcaagttaaaataaggctagtccgttatcaacttgaaaaagtggcaccgagtcggtgctcattgccctggggaggtggctggaacacttg

SEQ ID NO: 3741 - RNA, 128 nt, synthetic construct
  source 1..128: mol_type = other RNA
gttgccaagtgttccagccacgttttagagctagaaatagcaagttaaaataaggctagtccgttatcaacttgaaaaagtggcaccgagtcggtgcttgccctgggccggtggctggaacttttttt

SEQ ID NO: 3742 - RNA, 128 nt, synthetic construct
  source 1..128: mol_type = other RNA
ttgccaagtgttccagccacgttttagagctagaaatagcaagttaaaataaggctagtccgttatcaacttgaaaaagtggcaccgagtcggtgcttcattgccctgggacggtggctggaacactt

SEQ ID NO: 3743 - RNA, 128 nt, synthetic construct
  source 1..128: mol_type = other RNA
ttgccaagtgttccagccacgttttagagctagaaatagcaagttaaaataaggctagtccgttatcaacttgaaaaagtggcaccgagtcggtgctcattgccctggggcggtggctggaacacttg

SEQ ID NO: 3744 - RNA, 128 nt, synthetic construct
  source 1..128: mol_type = other RNA
gttgccaagtgttccagccacgttttagagctagaaatagcaagttaaaataaggctagtccgttatcaacttgaaaaagtggcaccgagtcggtgcttgccctgggacggtggctggaacttttttt

SEQ ID NO: 3745 - RNA, 128 nt, synthetic construct
  source 1..128: mol_type = other RNA
ttgccaagtgttccagccacgttttagagctagaaatagcaagttaaaataaggctagtccgttatcaacttgaaaaagtggcaccgagtcggtgcttcattgccctgggaaggtggctggaacactt

SEQ ID NO: 3746 - RNA, 128 nt, synthetic construct
  source 1..128: mol_type = other RNA
gttgccaagtgttccagccacgttttagagctagaaatagcaagttaaaataaggctagtccgttatcaacttgaaaaagtggcaccgagtcggtgcttgccctgggaaggtggctggaacttttttt

SEQ ID NO: 3747 - RNA, 128 nt, synthetic construct
  source 1..128: mol_type = other RNA
gttgccaagtgttccagccacgttttagagctagaaatagcaagttaaaataaggctagtccgttatcaacttgaaaaagtggcaccgagtcggtgctggggaggtggctggaacacttggttttttt

SEQ ID NO: 3748 - RNA, 128 nt, synthetic construct
  source 1..128: mol_type = other RNA
ttgccaagtgttccagccacgttttagagctagaaatagcaagttaaaataaggctagtccgttatcaacttgaaaaagtggcaccgagtcggtgctcattgccctgggtcggtggctggaacacttg

SEQ ID NO: 3749 - RNA, 128 nt, synthetic construct
  source 1..128: mol_type = other RNA
gttgccaagtgttccagccacgttttagagctagaaatagcaagttaaaataaggctagtccgttatcaacttgaaaaagtggcaccgagtcggtgcgccctgggccggtggctggaacacttttttt

SEQ ID NO: 3750 - RNA, 128 nt, synthetic construct
  source 1..128: mol_type = other RNA
gttgccaagtgttccagccacgttttagagctagaaatagcaagttaaaataaggctagtccgttatcaacttgaaaaagtggcaccgagtcggtgcgccctggggcggtggctggaacacttttttt

SEQ ID NO: 3751 - RNA, 128 nt, synthetic construct
  source 1..128: mol_type = other RNA
ttgccaagtgttccagccacgttttagagctagaaatagcaagttaaaataaggctagtccgttatcaacttgaaaaagtggcaccgagtcggtgctcattgccctgggaaggtggctggaacacttg

SEQ ID NO: 3752 - RNA, 128 nt, synthetic construct
  source 1..128: mol_type = other RNA
gttgccaagtgttccagccacgttttagagctagaaatagcaagttaaaataaggctagtccgttatcaacttgaaaaagtggcaccgagtcggtgcgccctggggaggtggctggaacacttttttt

SEQ ID NO: 3753 - RNA, 128 nt, synthetic construct
  source 1..128: mol_type = other RNA
gttgccaagtgttccagccacgttttagagctagaaatagcaagttaaaataaggctagtccgttatcaacttgaaaaagtggcaccgagtcggtgcgccctgggcaggtggctggaacacttttttt

SEQ ID NO: 3754 - RNA, 128 nt, synthetic construct
  source 1..128: mol_type = other RNA
gttgccaagtgttccagccacgttttagagctagaaatagcaagttaaaataaggctagtccgttatcaacttgaaaaagtggcaccgagtcggtgctgggaaggtggctggaacacttggttttttt

SEQ ID NO: 3755 - RNA, 128 nt, synthetic construct
  source 1..128: mol_type = other RNA
gttgccaagtgttccagccacgttttagagctagaaatagcaagttaaaataaggctagtccgttatcaacttgaaaaagtggcaccgagtcggtgctgggtaggtggctggaacacttggttttttt

SEQ ID NO: 3756 - RNA, 128 nt, synthetic construct
  source 1..128: mol_type = other RNA
gttgccaagtgttccagccacgttttagagctagaaatagcaagttaaaataaggctagtccgttatcaacttgaaaaagtggcaccgagtcggtgctgggacggtggctggaacacttggttttttt

SEQ ID NO: 3757 - RNA, 128 nt, synthetic construct
  source 1..128: mol_type = other RNA
gttgccaagtgttccagccacgttttagagctagaaatagcaagttaaaataaggctagtccgttatcaacttgaaaaagtggcaccgagtcggtgctgccctgggtaggtggctggaacattttttt

SEQ ID NO: 3758 - RNA, 128 nt, synthetic construct
  source 1..128: mol_type = other RNA
gttgccaagtgttccagccacgttttagagctagaaatagcaagttaaaataaggctagtccgttatcaacttgaaaaagtggcaccgagtcggtgctgggtcggtggctggaacacttggttttttt

SEQ ID NO: 3759 - RNA, 128 nt, synthetic construct
  source 1..128: mol_type = other RNA
gttgccaagtgttccagccacgttttagagctagaaatagcaagttaaaataaggctagtccgttatcaacttgaaaaagtggcaccgagtcggtgcttgccctggggcggtggctggaacttttttt

SEQ ID NO: 3760 - RNA, 128 nt, synthetic construct
  source 1..128: mol_type = other RNA
gttgccaagtgttccagccacgttttagagctagaaatagcaagttaaaataaggctagtccgttatcaacttgaaaaagtggcaccgagtcggtgcgccctgggacggtggctggaacacttttttt

SEQ ID NO: 3761 - RNA, 128 nt, synthetic construct
  source 1..128: mol_type = other RNA
gttgccaagtgttccagccacgttttagagctagaaatagcaagttaaaataaggctagtccgttatcaacttgaaaaagtggcaccgagtcggtgctgggcaggtggctggaacacttggttttttt

SEQ ID NO: 3762 - RNA, 128 nt, synthetic construct
  source 1..128: mol_type = other RNA
gttgccaagtgttccagccacgttttagagctagaaatagcaagttaaaataaggctagtccgttatcaacttgaaaaagtggcaccgagtcggtgctgccctggggcggtggctggaacattttttt

SEQ ID NO: 3763 - RNA, 128 nt, synthetic construct
  source 1..128: mol_type = other RNA
gttgccaagtgttccagccacgttttagagctagaaatagcaagttaaaataaggctagtccgttatcaacttgaaaaagtggcaccgagtcggtgctggggcggtggctggaacacttggttttttt

SEQ ID NO: 3764 - RNA, 128 nt, synthetic construct
  source 1..128: mol_type = other RNA
gttgccaagtgttccagccacgttttagagctagaaatagcaagttaaaataaggctagtccgttatcaacttgaaaaagtggcaccgagtcggtgctgccctgggtcggtggctggaacattttttt

SEQ ID NO: 3765 - RNA, 128 nt, synthetic construct
  source 1..128: mol_type = other RNA
gttgccaagtgttccagccacgttttagagctagaaatagcaagttaaaataaggctagtccgttatcaacttgaaaaagtggcaccgagtcggtgctgccctgggaaggtggctggaacattttttt

SEQ ID NO: 3766 - RNA, 128 nt, synthetic construct
  source 1..128: mol_type = other RNA
gttgccaagtgttccagccacgttttagagctagaaatagcaagttaaaataaggctagtccgttatcaacttgaaaaagtggcaccgagtcggtgctgccctggggaggtggctggaacattttttt

SEQ ID NO: 3767 - RNA, 128 nt, synthetic construct
  source 1..128: mol_type = other RNA
gttgccaagtgttccagccacgttttagagctagaaatagcaagttaaaataaggctagtccgttatcaacttgaaaaagtggcaccgagtcggtgcttgccctgggtaggtggctggaacttttttt

SEQ ID NO: 3768 - RNA, 128 nt, synthetic construct
  source 1..128: mol_type = other RNA
ttgccaagtgttccagccacgttttagagctagaaatagcaagttaaaataaggctagtccgttatcaacttgaaaaagtggcaccgagtcggtgcttcattgccctggggcggtggctggaacactt

SEQ ID NO: 3769 - RNA, 128 nt, synthetic construct
  source 1..128: mol_type = other RNA
gttgccaagtgttccagccacgttttagagctagaaatagcaagttaaaataaggctagtccgttatcaacttgaaaaagtggcaccgagtcggtgcgccctgggaaggtggctggaacacttttttt

SEQ ID NO: 3770 - RNA, 128 nt, synthetic construct
  source 1..128: mol_type = other RNA
gttgccaagtgttccagccacgttttagagctagaaatagcaagttaaaataaggctagtccgttatcaacttgaaaaagtggcaccgagtcggtgcgccctgggtcggtggctggaacacttttttt

SEQ ID NO: 3771 - RNA, 128 nt, synthetic construct
  source 1..128: mol_type = other RNA
gttgccaagtgttccagccacgttttagagctagaaatagcaagttaaaataaggctagtccgttatcaacttgaaaaagtggcaccgagtcggtgctgccctgggcaggtggctggaacattttttt

SEQ ID NO: 3772 - RNA, 129 nt, synthetic construct
  source 1..129: mol_type = other RNA
ttgccaagtgttccagccacgttttagagctagaaatagcaagttaaaataaggctagtccgttatcaacttgaaaaagtggcaccgagtcggtgcttcattgccctgggcaggtggctggaacacttg

SEQ ID NO: 3773 - RNA, 129 nt, synthetic construct
  source 1..129: mol_type = other RNA
gttgccaagtgttccagccacgttttagagctagaaatagcaagttaaaataaggctagtccgttatcaacttgaaaaagtggcaccgagtcggtgctgccctgggcaggtggctggaacacttttttt

SEQ ID NO: 3774 - RNA, 129 nt, synthetic construct
  source 1..129: mol_type = other RNA
gttgccaagtgttccagccacgttttagagctagaaatagcaagttaaaataaggctagtccgttatcaacttgaaaaagtggcaccgagtcggtgctgccctgggtaggtggctggaacacttttttt

SEQ ID NO: 3775 - RNA, 129 nt, synthetic construct
  source 1..129: mol_type = other RNA
ttgccaagtgttccagccacgttttagagctagaaatagcaagttaaaataaggctagtccgttatcaacttgaaaaagtggcaccgagtcggtgctcattgccctggggcggtggctggaacacttgg

SEQ ID NO: 3776 - RNA, 129 nt, synthetic construct
  source 1..129: mol_type = other RNA
ttgccaagtgttccagccacgttttagagctagaaatagcaagttaaaataaggctagtccgttatcaacttgaaaaagtggcaccgagtcggtgctcattgccctgggcaggtggctggaacacttgg

SEQ ID NO: 3777 - RNA, 129 nt, synthetic construct
  source 1..129: mol_type = other RNA
ttgccaagtgttccagccacgttttagagctagaaatagcaagttaaaataaggctagtccgttatcaacttgaaaaagtggcaccgagtcggtgcttcattgccctgggccggtggctggaacacttg

SEQ ID NO: 3778 - RNA, 129 nt, synthetic construct
  source 1..129: mol_type = other RNA
gttgccaagtgttccagccacgttttagagctagaaatagcaagttaaaataaggctagtccgttatcaacttgaaaaagtggcaccgagtcggtgcgccctgggaaggtggctggaacactttttttt

SEQ ID NO: 3779 - RNA, 129 nt, synthetic construct
  source 1..129: mol_type = other RNA
ttgccaagtgttccagccacgttttagagctagaaatagcaagttaaaataaggctagtccgttatcaacttgaaaaagtggcaccgagtcggtgcttcattgccctggggcggtggctggaacacttg

SEQ ID NO: 3780 - RNA, 129 nt, synthetic construct
  source 1..129: mol_type = other RNA
ttgccaagtgttccagccacgttttagagctagaaatagcaagttaaaataaggctagtccgttatcaacttgaaaaagtggcaccgagtcggtgcttcattgccctgggacggtggctggaacacttg

SEQ ID NO: 3781 - RNA, 129 nt, synthetic construct
  source 1..129: mol_type = other RNA
gttgccaagtgttccagccacgttttagagctagaaatagcaagttaaaataaggctagtccgttatcaacttgaaaaagtggcaccgagtcggtgcgccctggggaggtggctggaacactttttttt

SEQ ID NO: 3782 - RNA, 129 nt, synthetic construct
  source 1..129: mol_type = other RNA
gttgccaagtgttccagccacgttttagagctagaaatagcaagttaaaataaggctagtccgttatcaacttgaaaaagtggcaccgagtcggtgcgccctgggacggtggctggaacactttttttt

SEQ ID NO: 3783 - RNA, 129 nt, synthetic construct
  source 1..129: mol_type = other RNA
ttgccaagtgttccagccacgttttagagctagaaatagcaagttaaaataaggctagtccgttatcaacttgaaaaagtggcaccgagtcggtgctcattgccctgggacggtggctggaacacttgg

SEQ ID NO: 3784 - RNA, 129 nt, synthetic construct
  source 1..129: mol_type = other RNA
gttgccaagtgttccagccacgttttagagctagaaatagcaagttaaaataaggctagtccgttatcaacttgaaaaagtggcaccgagtcggtgcttgccctggggaggtggctggaacattttttt

SEQ ID NO: 3785 - RNA, 129 nt, synthetic construct
  source 1..129: mol_type = other RNA
gttgccaagtgttccagccacgttttagagctagaaatagcaagttaaaataaggctagtccgttatcaacttgaaaaagtggcaccgagtcggtgcattgccctggggaggtggctggaacttttttt

SEQ ID NO: 3786 - RNA, 129 nt, synthetic construct
  source 1..129: mol_type = other RNA
gttgccaagtgttccagccacgttttagagctagaaatagcaagttaaaataaggctagtccgttatcaacttgaaaaagtggcaccgagtcggtgcattgccctgggtaggtggctggaacttttttt

SEQ ID NO: 3787 - RNA, 129 nt, synthetic construct
  source 1..129: mol_type = other RNA
gttgccaagtgttccagccacgttttagagctagaaatagcaagttaaaataaggctagtccgttatcaacttgaaaaagtggcaccgagtcggtgcattgccctgggtcggtggctggaacttttttt

SEQ ID NO: 3788 - RNA, 129 nt, synthetic construct
  source 1..129: mol_type = other RNA
gttgccaagtgttccagccacgttttagagctagaaatagcaagttaaaataaggctagtccgttatcaacttgaaaaagtggcaccgagtcggtgcattgccctgggcaggtggctggaacttttttt

SEQ ID NO: 3789 - RNA, 129 nt, synthetic construct
  source 1..129: mol_type = other RNA
gttgccaagtgttccagccacgttttagagctagaaatagcaagttaaaataaggctagtccgttatcaacttgaaaaagtggcaccgagtcggtgcgccctgggtaggtggctggaacactttttttt

SEQ ID NO: 3790 - RNA, 129 nt, synthetic construct
  source 1..129: mol_type = other RNA
gttgccaagtgttccagccacgttttagagctagaaatagcaagttaaaataaggctagtccgttatcaacttgaaaaagtggcaccgagtcggtgcattgccctggggcggtggctggaacttttttt

SEQ ID NO: 3791 - RNA, 129 nt, synthetic construct
  source 1..129: mol_type = other RNA
gttgccaagtgttccagccacgttttagagctagaaatagcaagttaaaataaggctagtccgttatcaacttgaaaaagtggcaccgagtcggtgcgccctggggcggtggctggaacactttttttt

SEQ ID NO: 3792 - RNA, 129 nt, synthetic construct
  source 1..129: mol_type = other RNA
gttgccaagtgttccagccacgttttagagctagaaatagcaagttaaaataaggctagtccgttatcaacttgaaaaagtggcaccgagtcggtgcttgccctggggcggtggctggaacattttttt

SEQ ID NO: 3793 - RNA, 129 nt, synthetic construct
  source 1..129: mol_type = other RNA
ttgccaagtgttccagccacgttttagagctagaaatagcaagttaaaataaggctagtccgttatcaacttgaaaaagtggcaccgagtcggtgcttcattgccctgggaaggtggctggaacacttg

SEQ ID NO: 3794 - RNA, 129 nt, synthetic construct
  source 1..129: mol_type = other RNA
gttgccaagtgttccagccacgttttagagctagaaatagcaagttaaaataaggctagtccgttatcaacttgaaaaagtggcaccgagtcggtgcttgccctgggaaggtggctggaacattttttt

SEQ ID NO: 3795 - RNA, 129 nt, synthetic construct
  source 1..129: mol_type = other RNA
ttgccaagtgttccagccacgttttagagctagaaatagcaagttaaaataaggctagtccgttatcaacttgaaaaagtggcaccgagtcggtgctcattgccctggggaggtggctggaacacttgg

SEQ ID NO: 3796 - RNA, 129 nt, synthetic construct
  source 1..129: mol_type = other RNA
gttgccaagtgttccagccacgttttagagctagaaatagcaagttaaaataaggctagtccgttatcaacttgaaaaagtggcaccgagtcggtgctgccctgggtcggtggctggaacacttttttt

SEQ ID NO: 3797 - RNA, 129 nt, synthetic construct
  source 1..129: mol_type = other RNA
gttgccaagtgttccagccacgttttagagctagaaatagcaagttaaaataaggctagtccgttatcaacttgaaaaagtggcaccgagtcggtgcgccctgggtcggtggctggaacactttttttt

SEQ ID NO: 3798 - RNA, 129 nt, synthetic construct
  source 1..129: mol_type = other RNA
ttgccaagtgttccagccacgttttagagctagaaatagcaagttaaaataaggctagtccgttatcaacttgaaaaagtggcaccgagtcggtgctcattgccctgggtaggtggctggaacacttgg

SEQ ID NO: 3799 - RNA, 129 nt, synthetic construct
  source 1..129: mol_type = other RNA
gttgccaagtgttccagccacgttttagagctagaaatagcaagttaaaataaggctagtccgttatcaacttgaaaaagtggcaccgagtcggtgctgccctgggccggtggctggaacacttttttt

SEQ ID NO: 3800 - RNA, 129 nt, synthetic construct
  source 1..129: mol_type = other RNA
gttgccaagtgttccagccacgttttagagctagaaatagcaagttaaaataaggctagtccgttatcaacttgaaaaagtggcaccgagtcggtgcattgccctgggacggtggctggaacttttttt

SEQ ID NO: 3801 - RNA, 129 nt, synthetic construct
  source 1..129: mol_type = other RNA
ttgccaagtgttccagccacgttttagagctagaaatagcaagttaaaataaggctagtccgttatcaacttgaaaaagtggcaccgagtcggtgctcattgccctgggccggtggctggaacacttgg

SEQ ID NO: 3802 - RNA, 129 nt, synthetic construct
  source 1..129: mol_type = other RNA
gttgccaagtgttccagccacgttttagagctagaaatagcaagttaaaataaggctagtccgttatcaacttgaaaaagtggcaccgagtcggtgcgccctgggccggtggctggaacactttttttt

SEQ ID NO: 3803 - RNA, 129 nt, synthetic construct
  source 1..129: mol_type = other RNA
gttgccaagtgttccagccacgttttagagctagaaatagcaagttaaaataaggctagtccgttatcaacttgaaaaagtggcaccgagtcggtgcttgccctgggcaggtggctggaacattttttt

SEQ ID NO: 3804 - RNA, 129 nt, synthetic construct
  source 1..129: mol_type = other RNA
gttgccaagtgttccagccacgttttagagctagaaatagcaagttaaaataaggctagtccgttatcaacttgaaaaagtggcaccgagtcggtgcattgccctgggaaggtggctggaacttttttt

SEQ ID NO: 3805 - RNA, 129 nt, synthetic construct
  source 1..129: mol_type = other RNA
gttgccaagtgttccagccacgttttagagctagaaatagcaagttaaaataaggctagtccgttatcaacttgaaaaagtggcaccgagtcggtgctgccctgggacggtggctggaacacttttttt

SEQ ID NO: 3806 - RNA, 129 nt, synthetic construct
  source 1..129: mol_type = other RNA
gttgccaagtgttccagccacgttttagagctagaaatagcaagttaaaataaggctagtccgttatcaacttgaaaaagtggcaccgagtcggtgcttgccctgggccggtggctggaacattttttt

SEQ ID NO: 3807 - RNA, 129 nt, synthetic construct
  source 1..129: mol_type = other RNA
ttgccaagtgttccagccacgttttagagctagaaatagcaagttaaaataaggctagtccgttatcaacttgaaaaagtggcaccgagtcggtgcttcattgccctggggaggtggctggaacacttg

SEQ ID NO: 3808 - RNA, 129 nt, synthetic construct
  source 1..129: mol_type = other RNA
ttgccaagtgttccagccacgttttagagctagaaatagcaagttaaaataaggctagtccgttatcaacttgaaaaagtggcaccgagtcggtgcttcattgccctgggtcggtggctggaacacttg

SEQ ID NO: 3809 - RNA, 129 nt, synthetic construct
  source 1..129: mol_type = other RNA
gttgccaagtgttccagccacgttttagagctagaaatagcaagttaaaataaggctagtccgttatcaacttgaaaaagtggcaccgagtcggtgctgccctgggaaggtggctggaacacttttttt

SEQ ID NO: 3810 - RNA, 129 nt, synthetic construct
  source 1..129: mol_type = other RNA
gttgccaagtgttccagccacgttttagagctagaaatagcaagttaaaataaggctagtccgttatcaacttgaaaaagtggcaccgagtcggtgcttgccctgggtcggtggctggaacattttttt

SEQ ID NO: 3811 - RNA, 129 nt, synthetic construct
  source 1..129: mol_type = other RNA
ttgccaagtgttccagccacgttttagagctagaaatagcaagttaaaataaggctagtccgttatcaacttgaaaaagtggcaccgagtcggtgctcattgccctgggaaggtggctggaacacttgg

SEQ ID NO: 3812 - RNA, 129 nt, synthetic construct
  source 1..129: mol_type = other RNA
ttgccaagtgttccagccacgttttagagctagaaatagcaagttaaaataaggctagtccgttatcaacttgaaaaagtggcaccgagtcggtgcttcattgccctgggtaggtggctggaacacttg

SEQ ID NO: 3813 - RNA, 129 nt, synthetic construct
  source 1..129: mol_type = other RNA
gttgccaagtgttccagccacgttttagagctagaaatagcaagttaaaataaggctagtccgttatcaacttgaaaaagtggcaccgagtcggtgcattgccctgggccggtggctggaacttttttt

SEQ ID NO: 3814 - RNA, 129 nt, synthetic construct
  source 1..129: mol_type = other RNA
gttgccaagtgttccagccacgttttagagctagaaatagcaagttaaaataaggctagtccgttatcaacttgaaaaagtggcaccgagtcggtgcttgccctgggtaggtggctggaacattttttt

SEQ ID NO: 3815 - RNA, 129 nt, synthetic construct
  source 1..129: mol_type = other RNA
ttgccaagtgttccagccacgttttagagctagaaatagcaagttaaaataaggctagtccgttatcaacttgaaaaagtggcaccgagtcggtgctcattgccctgggtcggtggctggaacacttgg

SEQ ID NO: 3816 - RNA, 129 nt, synthetic construct
  source 1..129: mol_type = other RNA
gttgccaagtgttccagccacgttttagagctagaaatagcaagttaaaataaggctagtccgttatcaacttgaaaaagtggcaccgagtcggtgctgccctggggaggtggctggaacacttttttt

SEQ ID NO: 3817 - RNA, 129 nt, synthetic construct
  source 1..129: mol_type = other RNA
gttgccaagtgttccagccacgttttagagctagaaatagcaagttaaaataaggctagtccgttatcaacttgaaaaagtggcaccgagtcggtgcttgccctgggacggtggctggaacattttttt

SEQ ID NO: 3818 - RNA, 129 nt, synthetic construct
  source 1..129: mol_type = other RNA
gttgccaagtgttccagccacgttttagagctagaaatagcaagttaaaataaggctagtccgttatcaacttgaaaaagtggcaccgagtcggtgcgccctgggcaggtggctggaacactttttttt

SEQ ID NO: 3819 - RNA, 129 nt, synthetic construct
  source 1..129: mol_type = other RNA
gttgccaagtgttccagccacgttttagagctagaaatagcaagttaaaataaggctagtccgttatcaacttgaaaaagtggcaccgagtcggtgctgccctggggcggtggctggaacacttttttt

SEQ ID NO: 3820 - RNA, 130 nt, synthetic construct
  source 1..130: mol_type = other RNA
gttgccaagtgttccagccacgttttagagctagaaatagcaagttaaaataaggctagtccgttatcaacttgaaaaagtggcaccgagtcggtgcgccctgggcaggtggctggaacacttttttttt

SEQ ID NO: 3821 - RNA, 130 nt, synthetic construct
  source 1..130: mol_type = other RNA
gttgccaagtgttccagccacgttttagagctagaaatagcaagttaaaataaggctagtccgttatcaacttgaaaaagtggcaccgagtcggtgcattgccctggggaggtggctggaacattttttt

SEQ ID NO: 3822 - RNA, 130 nt, synthetic construct
  source 1..130: mol_type = other RNA
gttgccaagtgttccagccacgttttagagctagaaatagcaagttaaaataaggctagtccgttatcaacttgaaaaagtggcaccgagtcggtgcattgccctgggccggtggctggaacattttttt

SEQ ID NO: 3823 - RNA, 130 nt, synthetic construct
  source 1..130: mol_type = other RNA
gttgccaagtgttccagccacgttttagagctagaaatagcaagttaaaataaggctagtccgttatcaacttgaaaaagtggcaccgagtcggtgctgccctggggaggtggctggaacactttttttt

SEQ ID NO: 3824 - RNA, 130 nt, synthetic construct
  source 1..130: mol_type = other RNA
gttgccaagtgttccagccacgttttagagctagaaatagcaagttaaaataaggctagtccgttatcaacttgaaaaagtggcaccgagtcggtgcgccctggggcggtggctggaacacttttttttt

SEQ ID NO: 3825 - RNA, 130 nt, synthetic construct
  source 1..130: mol_type = other RNA
gttgccaagtgttccagccacgttttagagctagaaatagcaagttaaaataaggctagtccgttatcaacttgaaaaagtggcaccgagtcggtgcgccctgggacggtggctggaacacttttttttt

SEQ ID NO: 3826 - RNA, 130 nt, synthetic construct
  source 1..130: mol_type = other RNA
gttgccaagtgttccagccacgttttagagctagaaatagcaagttaaaataaggctagtccgttatcaacttgaaaaagtggcaccgagtcggtgctgccctgggtaggtggctggaacactttttttt

SEQ ID NO: 3827 - RNA, 130 nt, synthetic construct
  source 1..130: mol_type = other RNA
gttgccaagtgttccagccacgttttagagctagaaatagcaagttaaaataaggctagtccgttatcaacttgaaaaagtggcaccgagtcggtgcattgccctgggtaggtggctggaacattttttt

SEQ ID NO: 3828 - RNA, 130 nt, synthetic construct
  source 1..130: mol_type = other RNA
gttgccaagtgttccagccacgttttagagctagaaatagcaagttaaaataaggctagtccgttatcaacttgaaaaagtggcaccgagtcggtgcattgccctgggaaggtggctggaacattttttt

SEQ ID NO: 3829 - RNA, 130 nt, synthetic construct
  source 1..130: mol_type = other RNA
gttgccaagtgttccagccacgttttagagctagaaatagcaagttaaaataaggctagtccgttatcaacttgaaaaagtggcaccgagtcggtgcttgccctggggcggtggctggaacacttttttt

SEQ ID NO: 3830 - RNA, 130 nt, synthetic construct
  source 1..130: mol_type = other RNA
gttgccaagtgttccagccacgttttagagctagaaatagcaagttaaaataaggctagtccgttatcaacttgaaaaagtggcaccgagtcggtgcattgccctggggcggtggctggaacattttttt

SEQ ID NO: 3831 - RNA, 130 nt, synthetic construct
  source 1..130: mol_type = other RNA
gttgccaagtgttccagccacgttttagagctagaaatagcaagttaaaataaggctagtccgttatcaacttgaaaaagtggcaccgagtcggtgctgccctgggtcggtggctggaacactttttttt

SEQ ID NO: 3832 - RNA, 130 nt, synthetic construct
  source 1..130: mol_type = other RNA
ttgccaagtgttccagccacgttttagagctagaaatagcaagttaaaataaggctagtccgttatcaacttgaaaaagtggcaccgagtcggtgcttcattgccctgggccggtggctggaacacttgg

SEQ ID NO: 3833 - RNA, 130 nt, synthetic construct
  source 1..130: mol_type = other RNA
gttgccaagtgttccagccacgttttagagctagaaatagcaagttaaaataaggctagtccgttatcaacttgaaaaagtggcaccgagtcggtgctgccctgggccggtggctggaacactttttttt

SEQ ID NO: 3834 - RNA, 130 nt, synthetic construct
  source 1..130: mol_type = other RNA
ttgccaagtgttccagccacgttttagagctagaaatagcaagttaaaataaggctagtccgttatcaacttgaaaaagtggcaccgagtcggtgcttcattgccctgggacggtggctggaacacttgg

SEQ ID NO: 3835 - RNA, 130 nt, synthetic construct
  source 1..130: mol_type = other RNA
gttgccaagtgttccagccacgttttagagctagaaatagcaagttaaaataaggctagtccgttatcaacttgaaaaagtggcaccgagtcggtgcgccctgggtaggtggctggaacacttttttttt

SEQ ID NO: 3836 - RNA, 130 nt, synthetic construct
  source 1..130: mol_type = other RNA
gttgccaagtgttccagccacgttttagagctagaaatagcaagttaaaataaggctagtccgttatcaacttgaaaaagtggcaccgagtcggtgcattgccctgggtcggtggctggaacattttttt

SEQ ID NO: 3837 - RNA, 130 nt, synthetic construct
  source 1..130: mol_type = other RNA
gttgccaagtgttccagccacgttttagagctagaaatagcaagttaaaataaggctagtccgttatcaacttgaaaaagtggcaccgagtcggtgcgccctgggaaggtggctggaacacttttttttt

SEQ ID NO: 3838 - RNA, 130 nt, synthetic construct
  source 1..130: mol_type = other RNA
gttgccaagtgttccagccacgttttagagctagaaatagcaagttaaaataaggctagtccgttatcaacttgaaaaagtggcaccgagtcggtgcgccctggggaggtggctggaacacttttttttt

SEQ ID NO: 3839 - RNA, 130 nt, synthetic construct
  source 1..130: mol_type = other RNA
gttgccaagtgttccagccacgttttagagctagaaatagcaagttaaaataaggctagtccgttatcaacttgaaaaagtggcaccgagtcggtgctgccctgggcaggtggctggaacactttttttt

SEQ ID NO: 3840 - RNA, 130 nt, synthetic construct
  source 1..130: mol_type = other RNA
gttgccaagtgttccagccacgttttagagctagaaatagcaagttaaaataaggctagtccgttatcaacttgaaaaagtggcaccgagtcggtgctgccctggggcggtggctggaacactttttttt

SEQ ID NO: 3841 - RNA, 130 nt, synthetic construct
  source 1..130: mol_type = other RNA
ttgccaagtgttccagccacgttttagagctagaaatagcaagttaaaataaggctagtccgttatcaacttgaaaaagtggcaccgagtcggtgcttcattgccctgggaaggtggctggaacacttgg

SEQ ID NO: 3842 - RNA, 130 nt, synthetic construct
  source 1..130: mol_type = other RNA
ttgccaagtgttccagccacgttttagagctagaaatagcaagttaaaataaggctagtccgttatcaacttgaaaaagtggcaccgagtcggtgcttcattgccctgggtaggtggctggaacacttgg

SEQ ID NO: 3843 - RNA, 130 nt, synthetic construct
  source 1..130: mol_type = other RNA
gttgccaagtgttccagccacgttttagagctagaaatagcaagttaaaataaggctagtccgttatcaacttgaaaaagtggcaccgagtcggtgcttgccctgggacggtggctggaacacttttttt

SEQ ID NO: 3844 - RNA, 130 nt, synthetic construct
  source 1..130: mol_type = other RNA
gttgccaagtgttccagccacgttttagagctagaaatagcaagttaaaataaggctagtccgttatcaacttgaaaaagtggcaccgagtcggtgcattgccctgggacggtggctggaacattttttt

SEQ ID NO: 3845 - RNA, 130 nt, synthetic construct
  source 1..130: mol_type = other RNA
gttgccaagtgttccagccacgttttagagctagaaatagcaagttaaaataaggctagtccgttatcaacttgaaaaagtggcaccgagtcggtgcttgccctgggcaggtggctggaacacttttttt

SEQ ID NO: 3846 - RNA, 130 nt, synthetic construct
  source 1..130: mol_type = other RNA
gttgccaagtgttccagccacgttttagagctagaaatagcaagttaaaataaggctagtccgttatcaacttgaaaaagtggcaccgagtcggtgcattgccctgggcaggtggctggaacattttttt

SEQ ID NO: 3847 - RNA, 130 nt, synthetic construct
  source 1..130: mol_type = other RNA
gttgccaagtgttccagccacgttttagagctagaaatagcaagttaaaataaggctagtccgttatcaacttgaaaaagtggcaccgagtcggtgcttgccctgggtaggtggctggaacacttttttt

SEQ ID NO: 3848 - RNA, 130 nt, synthetic construct
  source 1..130: mol_type = other RNA
gttgccaagtgttccagccacgttttagagctagaaatagcaagttaaaataaggctagtccgttatcaacttgaaaaagtggcaccgagtcggtgcttgccctgggaaggtggctggaacacttttttt

SEQ ID NO: 3849 - RNA, 130 nt, synthetic construct
  source 1..130: mol_type = other RNA
gttgccaagtgttccagccacgttttagagctagaaatagcaagttaaaataaggctagtccgttatcaacttgaaaaagtggcaccgagtcggtgcgccctgggtcggtggctggaacacttttttttt

SEQ ID NO: 3850 - RNA, 130 nt, synthetic construct
  source 1..130: mol_type = other RNA
gttgccaagtgttccagccacgttttagagctagaaatagcaagttaaaataaggctagtccgttatcaacttgaaaaagtggcaccgagtcggtgctgccctgggacggtggctggaacactttttttt

SEQ ID NO: 3851 - RNA, 130 nt, synthetic construct
  source 1..130: mol_type = other RNA
gttgccaagtgttccagccacgttttagagctagaaatagcaagttaaaataaggctagtccgttatcaacttgaaaaagtggcaccgagtcggtgcgccctgggccggtggctggaacacttttttttt

SEQ ID NO: 3852 - RNA, 130 nt, synthetic construct
  source 1..130: mol_type = other RNA
ttgccaagtgttccagccacgttttagagctagaaatagcaagttaaaataaggctagtccgttatcaacttgaaaaagtggcaccgagtcggtgcttcattgccctgggcaggtggctggaacacttgg

SEQ ID NO: 3853 - RNA, 130 nt, synthetic construct
  source 1..130: mol_type = other RNA
gttgccaagtgttccagccacgttttagagctagaaatagcaagttaaaataaggctagtccgttatcaacttgaaaaagtggcaccgagtcggtgctgccctgggaaggtggctggaacactttttttt

SEQ ID NO: 3854 - RNA, 130 nt, synthetic construct
  source 1..130: mol_type = other RNA
ttgccaagtgttccagccacgttttagagctagaaatagcaagttaaaataaggctagtccgttatcaacttgaaaaagtggcaccgagtcggtgcttcattgccctggggcggtggctggaacacttgg

SEQ ID NO: 3855 - RNA, 130 nt, synthetic construct
  source 1..130: mol_type = other RNA
ttgccaagtgttccagccacgttttagagctagaaatagcaagttaaaataaggctagtccgttatcaacttgaaaaagtggcaccgagtcggtgcttcattgccctgggtcggtggctggaacacttgg

SEQ ID NO: 3856 - RNA, 130 nt, synthetic construct
  source 1..130: mol_type = other RNA
ttgccaagtgttccagccacgttttagagctagaaatagcaagttaaaataaggctagtccgttatcaacttgaaaaagtggcaccgagtcggtgcttcattgccctggggaggtggctggaacacttgg

SEQ ID NO: 3857 - RNA, 130 nt, synthetic construct
  source 1..130: mol_type = other RNA
gttgccaagtgttccagccacgttttagagctagaaatagcaagttaaaataaggctagtccgttatcaacttgaaaaagtggcaccgagtcggtgcttgccctggggaggtggctggaacacttttttt

SEQ ID NO: 3858 - RNA, 130 nt, synthetic construct
  source 1..130: mol_type = other RNA
gttgccaagtgttccagccacgttttagagctagaaatagcaagttaaaataaggctagtccgttatcaacttgaaaaagtggcaccgagtcggtgcttgccctgggccggtggctggaacacttttttt

SEQ ID NO: 3859 - RNA, 130 nt, synthetic construct
  source 1..130: mol_type = other RNA
gttgccaagtgttccagccacgttttagagctagaaatagcaagttaaaataaggctagtccgttatcaacttgaaaaagtggcaccgagtcggtgcttgccctgggtcggtggctggaacacttttttt

SEQ ID NO: 3860 - RNA, 131 nt, synthetic construct
  source 1..131: mol_type = other RNA
gttgccaagtgttccagccacgttttagagctagaaatagcaagttaaaataaggctagtccgttatcaacttgaaaaagtggcaccgagtcggtgctgccctggggcggtggctggaacacttttttttt

SEQ ID NO: 3861 - RNA, 131 nt, synthetic construct
  source 1..131: mol_type = other RNA
gttgccaagtgttccagccacgttttagagctagaaatagcaagttaaaataaggctagtccgttatcaacttgaaaaagtggcaccgagtcggtgcattgccctgggccggtggctggaacacttttttt

SEQ ID NO: 3862 - RNA, 131 nt, synthetic construct
  source 1..131: mol_type = other RNA
gttgccaagtgttccagccacgttttagagctagaaatagcaagttaaaataaggctagtccgttatcaacttgaaaaagtggcaccgagtcggtgcttgccctgggaaggtggctggaacactttttttt

SEQ ID NO: 3863 - RNA, 131 nt, synthetic construct
  source 1..131: mol_type = other RNA
gttgccaagtgttccagccacgttttagagctagaaatagcaagttaaaataaggctagtccgttatcaacttgaaaaagtggcaccgagtcggtgcattgccctgggacggtggctggaacacttttttt

SEQ ID NO: 3864 - RNA, 131 nt, synthetic construct
  source 1..131: mol_type = other RNA
gttgccaagtgttccagccacgttttagagctagaaatagcaagttaaaataaggctagtccgttatcaacttgaaaaagtggcaccgagtcggtgctgccctgggcaggtggctggaacacttttttttt

SEQ ID NO: 3865 - RNA, 131 nt, synthetic construct
  source 1..131: mol_type = other RNA
gttgccaagtgttccagccacgttttagagctagaaatagcaagttaaaataaggctagtccgttatcaacttgaaaaagtggcaccgagtcggtgctgccctgggaaggtggctggaacacttttttttt

SEQ ID NO: 3866 - RNA, 131 nt, synthetic construct
  source 1..131: mol_type = other RNA
gttgccaagtgttccagccacgttttagagctagaaatagcaagttaaaataaggctagtccgttatcaacttgaaaaagtggcaccgagtcggtgcattgccctggggaggtggctggaacacttttttt

SEQ ID NO: 3867 - RNA, 131 nt, synthetic construct
  source 1..131: mol_type = other RNA
gttgccaagtgttccagccacgttttagagctagaaatagcaagttaaaataaggctagtccgttatcaacttgaaaaagtggcaccgagtcggtgctgccctggggaggtggctggaacacttttttttt

SEQ ID NO: 3868 - RNA, 131 nt, synthetic construct
  source 1..131: mol_type = other RNA
gttgccaagtgttccagccacgttttagagctagaaatagcaagttaaaataaggctagtccgttatcaacttgaaaaagtggcaccgagtcggtgcgccctgggccggtggctggaacacttgttttttt

SEQ ID NO: 3869 - RNA, 131 nt, synthetic construct
  source 1..131: mol_type = other RNA
gttgccaagtgttccagccacgttttagagctagaaatagcaagttaaaataaggctagtccgttatcaacttgaaaaagtggcaccgagtcggtgctgccctgggccggtggctggaacacttttttttt

SEQ ID NO: 3870 - RNA, 131 nt, synthetic construct
  source 1..131: mol_type = other RNA
gttgccaagtgttccagccacgttttagagctagaaatagcaagttaaaataaggctagtccgttatcaacttgaaaaagtggcaccgagtcggtgctcattgccctgggtaggtggctggaacttttttt

SEQ ID NO: 3871 - RNA, 131 nt, synthetic construct
  source 1..131: mol_type = other RNA
gttgccaagtgttccagccacgttttagagctagaaatagcaagttaaaataaggctagtccgttatcaacttgaaaaagtggcaccgagtcggtgctgccctgggtaggtggctggaacacttttttttt

SEQ ID NO: 3872 - RNA, 131 nt, synthetic construct
  source 1..131: mol_type = other RNA
gttgccaagtgttccagccacgttttagagctagaaatagcaagttaaaataaggctagtccgttatcaacttgaaaaagtggcaccgagtcggtgctcattgccctgggtcggtggctggaacttttttt

SEQ ID NO: 3873 - RNA, 131 nt, synthetic construct
  source 1..131: mol_type = other RNA
gttgccaagtgttccagccacgttttagagctagaaatagcaagttaaaataaggctagtccgttatcaacttgaaaaagtggcaccgagtcggtgcttgccctgggcaggtggctggaacactttttttt

SEQ ID NO: 3874 - RNA, 131 nt, synthetic construct
  source 1..131: mol_type = other RNA
gttgccaagtgttccagccacgttttagagctagaaatagcaagttaaaataaggctagtccgttatcaacttgaaaaagtggcaccgagtcggtgcttgccctgggacggtggctggaacactttttttt

SEQ ID NO: 3875 - RNA, 131 nt, synthetic construct
  source 1..131: mol_type = other RNA
gttgccaagtgttccagccacgttttagagctagaaatagcaagttaaaataaggctagtccgttatcaacttgaaaaagtggcaccgagtcggtgcgccctggggaggtggctggaacacttgttttttt

SEQ ID NO: 3876 - RNA, 131 nt, synthetic construct
  source 1..131: mol_type = other RNA
gttgccaagtgttccagccacgttttagagctagaaatagcaagttaaaataaggctagtccgttatcaacttgaaaaagtggcaccgagtcggtgcattgccctggggcggtggctggaacacttttttt

SEQ ID NO: 3877 - RNA, 131 nt, synthetic construct
  source 1..131: mol_type = other RNA
gttgccaagtgttccagccacgttttagagctagaaatagcaagttaaaataaggctagtccgttatcaacttgaaaaagtggcaccgagtcggtgcgccctgggtcggtggctggaacacttgttttttt

SEQ ID NO: 3878 - RNA, 131 nt, synthetic construct
  source 1..131: mol_type = other RNA
gttgccaagtgttccagccacgttttagagctagaaatagcaagttaaaataaggctagtccgttatcaacttgaaaaagtggcaccgagtcggtgctgccctgggacggtggctggaacacttttttttt

SEQ ID NO: 3879 - RNA, 131 nt, synthetic construct
  source 1..131: mol_type = other RNA
gttgccaagtgttccagccacgttttagagctagaaatagcaagttaaaataaggctagtccgttatcaacttgaaaaagtggcaccgagtcggtgcattgccctgggaaggtggctggaacacttttttt

SEQ ID NO: 3880 - RNA, 131 nt, synthetic construct
  source 1..131: mol_type = other RNA
gttgccaagtgttccagccacgttttagagctagaaatagcaagttaaaataaggctagtccgttatcaacttgaaaaagtggcaccgagtcggtgcattgccctgggcaggtggctggaacacttttttt

SEQ ID NO: 3881 - RNA, 131 nt, synthetic construct
  source 1..131: mol_type = other RNA
gttgccaagtgttccagccacgttttagagctagaaatagcaagttaaaataaggctagtccgttatcaacttgaaaaagtggcaccgagtcggtgcattgccctgggtaggtggctggaacacttttttt

SEQ ID NO: 3882 - RNA, 131 nt, synthetic construct
  source 1..131: mol_type = other RNA
gttgccaagtgttccagccacgttttagagctagaaatagcaagttaaaataaggctagtccgttatcaacttgaaaaagtggcaccgagtcggtgcttgccctgggccggtggctggaacactttttttt

SEQ ID NO: 3883 - RNA, 131 nt, synthetic construct
  source 1..131: mol_type = other RNA
gttgccaagtgttccagccacgttttagagctagaaatagcaagttaaaataaggctagtccgttatcaacttgaaaaagtggcaccgagtcggtgctgccctgggtcggtggctggaacacttttttttt

SEQ ID NO: 3884 - RNA, 131 nt, synthetic construct
  source 1..131: mol_type = other RNA
gttgccaagtgttccagccacgttttagagctagaaatagcaagttaaaataaggctagtccgttatcaacttgaaaaagtggcaccgagtcggtgctcattgccctggggaggtggctggaacttttttt

SEQ ID NO: 3885 - RNA, 131 nt, synthetic construct
  source 1..131: mol_type = other RNA
gttgccaagtgttccagccacgttttagagctagaaatagcaagttaaaataaggctagtccgttatcaacttgaaaaagtggcaccgagtcggtgctcattgccctgggaaggtggctggaacttttttt

SEQ ID NO: 3886 - RNA, 131 nt, synthetic construct
  source 1..131: mol_type = other RNA
gttgccaagtgttccagccacgttttagagctagaaatagcaagttaaaataaggctagtccgttatcaacttgaaaaagtggcaccgagtcggtgctcattgccctgggacggtggctggaacttttttt

SEQ ID NO: 3887 - RNA, 131 nt, synthetic construct
  source 1..131: mol_type = other RNA
gttgccaagtgttccagccacgttttagagctagaaatagcaagttaaaataaggctagtccgttatcaacttgaaaaagtggcaccgagtcggtgctcattgccctgggcaggtggctggaacttttttt

SEQ ID NO: 3888 - RNA, 131 nt, synthetic construct
  source 1..131: mol_type = other RNA
gttgccaagtgttccagccacgttttagagctagaaatagcaagttaaaataaggctagtccgttatcaacttgaaaaagtggcaccgagtcggtgctcattgccctggggcggtggctggaacttttttt

SEQ ID NO: 3889 - RNA, 131 nt, synthetic construct
  source 1..131: mol_type = other RNA
gttgccaagtgttccagccacgttttagagctagaaatagcaagttaaaataaggctagtccgttatcaacttgaaaaagtggcaccgagtcggtgcgccctgggtaggtggctggaacacttgttttttt

SEQ ID NO: 3890 - RNA, 131 nt, synthetic construct
  source 1..131: mol_type = other RNA
gttgccaagtgttccagccacgttttagagctagaaatagcaagttaaaataaggctagtccgttatcaacttgaaaaagtggcaccgagtcggtgcgccctgggcaggtggctggaacacttgttttttt

SEQ ID NO: 3891 - RNA, 131 nt, synthetic construct
  source 1..131: mol_type = other RNA
gttgccaagtgttccagccacgttttagagctagaaatagcaagttaaaataaggctagtccgttatcaacttgaaaaagtggcaccgagtcggtgcttgccctggggaggtggctggaacactttttttt

SEQ ID NO: 3892 - RNA, 131 nt, synthetic construct
  source 1..131: mol_type = other RNA
gttgccaagtgttccagccacgttttagagctagaaatagcaagttaaaataaggctagtccgttatcaacttgaaaaagtggcaccgagtcggtgctcattgccctgggccggtggctggaacttttttt

SEQ ID NO: 3893 - RNA, 131 nt, synthetic construct
  source 1..131: mol_type = other RNA
gttgccaagtgttccagccacgttttagagctagaaatagcaagttaaaataaggctagtccgttatcaacttgaaaaagtggcaccgagtcggtgcgccctgggacggtggctggaacacttgttttttt

SEQ ID NO: 3894 - RNA, 131 nt, synthetic construct
  source 1..131: mol_type = other RNA
gttgccaagtgttccagccacgttttagagctagaaatagcaagttaaaataaggctagtccgttatcaacttgaaaaagtggcaccgagtcggtgcttgccctggggcggtggctggaacactttttttt

SEQ ID NO: 3895 - RNA, 131 nt, synthetic construct
  source 1..131: mol_type = other RNA
gttgccaagtgttccagccacgttttagagctagaaatagcaagttaaaataaggctagtccgttatcaacttgaaaaagtggcaccgagtcggtgcattgccctgggtcggtggctggaacacttttttt

SEQ ID NO: 3896 - RNA, 131 nt, synthetic construct
  source 1..131: mol_type = other RNA
gttgccaagtgttccagccacgttttagagctagaaatagcaagttaaaataaggctagtccgttatcaacttgaaaaagtggcaccgagtcggtgcgccctggggcggtggctggaacacttgttttttt

SEQ ID NO: 3897 - RNA, 131 nt, synthetic construct
  source 1..131: mol_type = other RNA
gttgccaagtgttccagccacgttttagagctagaaatagcaagttaaaataaggctagtccgttatcaacttgaaaaagtggcaccgagtcggtgcttgccctgggtaggtggctggaacactttttttt

SEQ ID NO: 3898 - RNA, 131 nt, synthetic construct
  source 1..131: mol_type = other RNA
gttgccaagtgttccagccacgttttagagctagaaatagcaagttaaaataaggctagtccgttatcaacttgaaaaagtggcaccgagtcggtgcgccctgggaaggtggctggaacacttgttttttt

SEQ ID NO: 3899 - RNA, 131 nt, synthetic construct
  source 1..131: mol_type = other RNA
gttgccaagtgttccagccacgttttagagctagaaatagcaagttaaaataaggctagtccgttatcaacttgaaaaagtggcaccgagtcggtgcttgccctgggtcggtggctggaacactttttttt

SEQ ID NO: 3900 - RNA, 132 nt, synthetic construct
  source 1..132: mol_type = other RNA
gttgccaagtgttccagccacgttttagagctagaaatagcaagttaaaataaggctagtccgttatcaacttgaaaaagtggcaccgagtcggtgcttcattgccctgggccggtggctggaacttttttt

SEQ ID NO: 3901 - RNA, 132 nt, synthetic construct
  source 1..132: mol_type = other RNA
gttgccaagtgttccagccacgttttagagctagaaatagcaagttaaaataaggctagtccgttatcaacttgaaaaagtggcaccgagtcggtgcattgccctgggacggtggctggaacactttttttt

SEQ ID NO: 3902 - RNA, 132 nt, synthetic construct
  source 1..132: mol_type = other RNA
gttgccaagtgttccagccacgttttagagctagaaatagcaagttaaaataaggctagtccgttatcaacttgaaaaagtggcaccgagtcggtgcttcattgccctgggtaggtggctggaacttttttt

SEQ ID NO: 3903 - RNA, 132 nt, synthetic construct
  source 1..132: mol_type = other RNA
gttgccaagtgttccagccacgttttagagctagaaatagcaagttaaaataaggctagtccgttatcaacttgaaaaagtggcaccgagtcggtgcttgccctgggccggtggctggaacacttttttttt

SEQ ID NO: 3904 - RNA, 132 nt, synthetic construct
  source 1..132: mol_type = other RNA
gttgccaagtgttccagccacgttttagagctagaaatagcaagttaaaataaggctagtccgttatcaacttgaaaaagtggcaccgagtcggtgcttcattgccctggggcggtggctggaacttttttt

SEQ ID NO: 3905 - RNA, 132 nt, synthetic construct
  source 1..132: mol_type = other RNA
gttgccaagtgttccagccacgttttagagctagaaatagcaagttaaaataaggctagtccgttatcaacttgaaaaagtggcaccgagtcggtgctcattgccctggggcggtggctggaacattttttt

SEQ ID NO: 3906 - RNA, 132 nt, synthetic construct
  source 1..132: mol_type = other RNA
gttgccaagtgttccagccacgttttagagctagaaatagcaagttaaaataaggctagtccgttatcaacttgaaaaagtggcaccgagtcggtgctcattgccctggggaggtggctggaacattttttt

SEQ ID NO: 3907 - RNA, 132 nt, synthetic construct
  source 1..132: mol_type = other RNA
gttgccaagtgttccagccacgttttagagctagaaatagcaagttaaaataaggctagtccgttatcaacttgaaaaagtggcaccgagtcggtgctcattgccctgggccggtggctggaacattttttt

SEQ ID NO: 3908 - RNA, 132 nt, synthetic construct
  source 1..132: mol_type = other RNA
gttgccaagtgttccagccacgttttagagctagaaatagcaagttaaaataaggctagtccgttatcaacttgaaaaagtggcaccgagtcggtgctcattgccctgggcaggtggctggaacattttttt

SEQ ID NO: 3909 - RNA, 132 nt, synthetic construct
  source 1..132: mol_type = other RNA
gttgccaagtgttccagccacgttttagagctagaaatagcaagttaaaataaggctagtccgttatcaacttgaaaaagtggcaccgagtcggtgctcattgccctgggacggtggctggaacattttttt

SEQ ID NO: 3910 - RNA, 132 nt, synthetic construct
  source 1..132: mol_type = other RNA
gttgccaagtgttccagccacgttttagagctagaaatagcaagttaaaataaggctagtccgttatcaacttgaaaaagtggcaccgagtcggtgcattgccctggggcggtggctggaacactttttttt

SEQ ID NO: 3911 - RNA, 132 nt, synthetic construct
  source 1..132: mol_type = other RNA
gttgccaagtgttccagccacgttttagagctagaaatagcaagttaaaataaggctagtccgttatcaacttgaaaaagtggcaccgagtcggtgctcattgccctgggaaggtggctggaacattttttt

SEQ ID NO: 3912 - RNA, 132 nt, synthetic construct
  source 1..132: mol_type = other RNA
gttgccaagtgttccagccacgttttagagctagaaatagcaagttaaaataaggctagtccgttatcaacttgaaaaagtggcaccgagtcggtgcgccctgggtaggtggctggaacacttggttttttt

SEQ ID NO: 3913 - RNA, 132 nt, synthetic construct
  source 1..132: mol_type = other RNA
gttgccaagtgttccagccacgttttagagctagaaatagcaagttaaaataaggctagtccgttatcaacttgaaaaagtggcaccgagtcggtgctcattgccctgggtaggtggctggaacattttttt

SEQ ID NO: 3914 - RNA, 132 nt, synthetic construct
  source 1..132: mol_type = other RNA
gttgccaagtgttccagccacgttttagagctagaaatagcaagttaaaataaggctagtccgttatcaacttgaaaaagtggcaccgagtcggtgcgccctgggccggtggctggaacacttggttttttt

SEQ ID NO: 3915 - RNA, 132 nt, synthetic construct
  source 1..132: mol_type = other RNA
gttgccaagtgttccagccacgttttagagctagaaatagcaagttaaaataaggctagtccgttatcaacttgaaaaagtggcaccgagtcggtgcattgccctgggtaggtggctggaacactttttttt

SEQ ID NO: 3916 - RNA, 132 nt, synthetic construct
  source 1..132: mol_type = other RNA
gttgccaagtgttccagccacgttttagagctagaaatagcaagttaaaataaggctagtccgttatcaacttgaaaaagtggcaccgagtcggtgcgccctgggcaggtggctggaacacttggttttttt

SEQ ID NO: 3917 - RNA, 132 nt, synthetic construct
  source 1..132: mol_type = other RNA
gttgccaagtgttccagccacgttttagagctagaaatagcaagttaaaataaggctagtccgttatcaacttgaaaaagtggcaccgagtcggtgcgccctgggaaggtggctggaacacttggttttttt

SEQ ID NO: 3918 - RNA, 132 nt, synthetic construct
  source 1..132: mol_type = other RNA
gttgccaagtgttccagccacgttttagagctagaaatagcaagttaaaataaggctagtccgttatcaacttgaaaaagtggcaccgagtcggtgcattgccctgggtcggtggctggaacactttttttt

SEQ ID NO: 3919 - RNA, 132 nt, synthetic construct
  source 1..132: mol_type = other RNA
gttgccaagtgttccagccacgttttagagctagaaatagcaagttaaaataaggctagtccgttatcaacttgaaaaagtggcaccgagtcggtgcgccctgggacggtggctggaacacttggttttttt

SEQ ID NO: 3920 - RNA, 132 nt, synthetic construct
  source 1..132: mol_type = other RNA
gttgccaagtgttccagccacgttttagagctagaaatagcaagttaaaataaggctagtccgttatcaacttgaaaaagtggcaccgagtcggtgctgccctgggtcggtggctggaacacttgttttttt

SEQ ID NO: 3921 - RNA, 132 nt, synthetic construct
  source 1..132: mol_type = other RNA
gttgccaagtgttccagccacgttttagagctagaaatagcaagttaaaataaggctagtccgttatcaacttgaaaaagtggcaccgagtcggtgctgccctgggtaggtggctggaacacttgttttttt

SEQ ID NO: 3922 - RNA, 132 nt, synthetic construct
  source 1..132: mol_type = other RNA
gttgccaagtgttccagccacgttttagagctagaaatagcaagttaaaataaggctagtccgttatcaacttgaaaaagtggcaccgagtcggtgcgccctggggaggtggctggaacacttggttttttt

SEQ ID NO: 3923 - RNA, 132 nt, synthetic construct
  source 1..132: mol_type = other RNA
gttgccaagtgttccagccacgttttagagctagaaatagcaagttaaaataaggctagtccgttatcaacttgaaaaagtggcaccgagtcggtgcttgccctgggtcggtggctggaacacttttttttt

SEQ ID NO: 3924 - RNA, 132 nt, synthetic construct
  source 1..132: mol_type = other RNA
gttgccaagtgttccagccacgttttagagctagaaatagcaagttaaaataaggctagtccgttatcaacttgaaaaagtggcaccgagtcggtgcttcattgccctggggaggtggctggaacttttttt

SEQ ID NO: 3925 - RNA, 132 nt, synthetic construct
  source 1..132: mol_type = other RNA
gttgccaagtgttccagccacgttttagagctagaaatagcaagttaaaataaggctagtccgttatcaacttgaaaaagtggcaccgagtcggtgctgccctggggcggtggctggaacacttgttttttt

SEQ ID NO: 3926 - RNA, 132 nt, synthetic construct
  source 1..132: mol_type = other RNA
gttgccaagtgttccagccacgttttagagctagaaatagcaagttaaaataaggctagtccgttatcaacttgaaaaagtggcaccgagtcggtgctcattgccctgggtcggtggctggaacattttttt

SEQ ID NO: 3927 - RNA, 132 nt, synthetic construct
  source 1..132: mol_type = other RNA
gttgccaagtgttccagccacgttttagagctagaaatagcaagttaaaataaggctagtccgttatcaacttgaaaaagtggcaccgagtcggtgcgccctgggtcggtggctggaacacttggttttttt

SEQ ID NO: 3928 - RNA, 132 nt, synthetic construct
  source 1..132: mol_type = other RNA
gttgccaagtgttccagccacgttttagagctagaaatagcaagttaaaataaggctagtccgttatcaacttgaaaaagtggcaccgagtcggtgctgccctgggcaggtggctggaacacttgttttttt

SEQ ID NO: 3929 - RNA, 132 nt, synthetic construct
  source 1..132: mol_type = other RNA
gttgccaagtgttccagccacgttttagagctagaaatagcaagttaaaataaggctagtccgttatcaacttgaaaaagtggcaccgagtcggtgctgccctgggacggtggctggaacacttgttttttt

SEQ ID NO: 3930 - RNA, 132 nt, synthetic construct
  source 1..132: mol_type = other RNA
gttgccaagtgttccagccacgttttagagctagaaatagcaagttaaaataaggctagtccgttatcaacttgaaaaagtggcaccgagtcggtgcttcattgccctgggcaggtggctggaacttttttt

SEQ ID NO: 3931 - RNA, 132 nt, synthetic construct
  source 1..132: mol_type = other RNA
gttgccaagtgttccagccacgttttagagctagaaatagcaagttaaaataaggctagtccgttatcaacttgaaaaagtggcaccgagtcggtgcttgccctgggcaggtggctggaacacttttttttt

SEQ ID NO: 3932 - RNA, 132 nt, synthetic construct
  source 1..132: mol_type = other RNA
gttgccaagtgttccagccacgttttagagctagaaatagcaagttaaaataaggctagtccgttatcaacttgaaaaagtggcaccgagtcggtgcttcattgccctgggtcggtggctggaacttttttt

SEQ ID NO: 3933 - RNA, 132 nt, synthetic construct
  source 1..132: mol_type = other RNA
gttgccaagtgttccagccacgttttagagctagaaatagcaagttaaaataaggctagtccgttatcaacttgaaaaagtggcaccgagtcggtgcttgccctggggcggtggctggaacacttttttttt

SEQ ID NO: 3934 - RNA, 132 nt, synthetic construct
  source 1..132: mol_type = other RNA
gttgccaagtgttccagccacgttttagagctagaaatagcaagttaaaataaggctagtccgttatcaacttgaaaaagtggcaccgagtcggtgcattgccctgggcaggtggctggaacactttttttt

SEQ ID NO: 3935 - RNA, 132 nt, synthetic construct
  source 1..132: mol_type = other RNA
gttgccaagtgttccagccacgttttagagctagaaatagcaagttaaaataaggctagtccgttatcaacttgaaaaagtggcaccgagtcggtgcttgccctggggaggtggctggaacacttttttttt

SEQ ID NO: 3936 - RNA, 132 nt, synthetic construct
  source 1..132: mol_type = other RNA
gttgccaagtgttccagccacgttttagagctagaaatagcaagttaaaataaggctagtccgttatcaacttgaaaaagtggcaccgagtcggtgcttgccctgggaaggtggctggaacacttttttttt

SEQ ID NO: 3937 - RNA, 132 nt, synthetic construct
  source 1..132: mol_type = other RNA
gttgccaagtgttccagccacgttttagagctagaaatagcaagttaaaataaggctagtccgttatcaacttgaaaaagtggcaccgagtcggtgcattgccctgggccggtggctggaacactttttttt

SEQ ID NO: 3938 - RNA, 132 nt, synthetic construct
  source 1..132: mol_type = other RNA
gttgccaagtgttccagccacgttttagagctagaaatagcaagttaaaataaggctagtccgttatcaacttgaaaaagtggcaccgagtcggtgcttgccctgggtaggtggctggaacacttttttttt

SEQ ID NO: 3939 - RNA, 132 nt, synthetic construct
  source 1..132: mol_type = other RNA
gttgccaagtgttccagccacgttttagagctagaaatagcaagttaaaataaggctagtccgttatcaacttgaaaaagtggcaccgagtcggtgcattgccctgggaaggtggctggaacactttttttt

SEQ ID NO: 3940 - RNA, 132 nt, synthetic construct
  source 1..132: mol_type = other RNA
gttgccaagtgttccagccacgttttagagctagaaatagcaagttaaaataaggctagtccgttatcaacttgaaaaagtggcaccgagtcggtgcttgccctgggacggtggctggaacacttttttttt

SEQ ID NO: 3941 - RNA, 132 nt, synthetic construct
  source 1..132: mol_type = other RNA
gttgccaagtgttccagccacgttttagagctagaaatagcaagttaaaataaggctagtccgttatcaacttgaaaaagtggcaccgagtcggtgctgccctggggaggtggctggaacacttgttttttt

SEQ ID NO: 3942 - RNA, 132 nt, synthetic construct
  source 1..132: mol_type = other RNA
gttgccaagtgttccagccacgttttagagctagaaatagcaagttaaaataaggctagtccgttatcaacttgaaaaagtggcaccgagtcggtgctgccctgggaaggtggctggaacacttgttttttt

SEQ ID NO: 3943 - RNA, 132 nt, synthetic construct
  source 1..132: mol_type = other RNA
gttgccaagtgttccagccacgttttagagctagaaatagcaagttaaaataaggctagtccgttatcaacttgaaaaagtggcaccgagtcggtgcgccctggggcggtggctggaacacttggttttttt

SEQ ID NO: 3944 - RNA, 132 nt, synthetic construct
  source 1..132: mol_type = other RNA
gttgccaagtgttccagccacgttttagagctagaaatagcaagttaaaataaggctagtccgttatcaacttgaaaaagtggcaccgagtcggtgctgccctgggccggtggctggaacacttgttttttt

SEQ ID NO: 3945 - RNA, 132 nt, synthetic construct
  source 1..132: mol_type = other RNA
gttgccaagtgttccagccacgttttagagctagaaatagcaagttaaaataaggctagtccgttatcaacttgaaaaagtggcaccgagtcggtgcttcattgccctgggacggtggctggaacttttttt

SEQ ID NO: 3946 - RNA, 132 nt, synthetic construct
  source 1..132: mol_type = other RNA
gttgccaagtgttccagccacgttttagagctagaaatagcaagttaaaataaggctagtccgttatcaacttgaaaaagtggcaccgagtcggtgcattgccctggggaggtggctggaacactttttttt

SEQ ID NO: 3947 - RNA, 132 nt, synthetic construct
  source 1..132: mol_type = other RNA
gttgccaagtgttccagccacgttttagagctagaaatagcaagttaaaataaggctagtccgttatcaacttgaaaaagtggcaccgagtcggtgcttcattgccctgggaaggtggctggaacttttttt

SEQ ID NO: 3948 - RNA, 133 nt, synthetic construct
  source 1..133: mol_type = other RNA
gttgccaagtgttccagccacgttttagagctagaaatagcaagttaaaataaggctagtccgttatcaacttgaaaaagtggcaccgagtcggtgcttcattgccctggggcggtggctggaacattttttt

SEQ ID NO: 3949 - RNA, 133 nt, synthetic construct
  source 1..133: mol_type = other RNA
gttgccaagtgttccagccacgttttagagctagaaatagcaagttaaaataaggctagtccgttatcaacttgaaaaagtggcaccgagtcggtgctcattgccctgggtaggtggctggaacacttttttt

SEQ ID NO: 3950 - RNA, 133 nt, synthetic construct
  source 1..133: mol_type = other RNA
gttgccaagtgttccagccacgttttagagctagaaatagcaagttaaaataaggctagtccgttatcaacttgaaaaagtggcaccgagtcggtgcttgccctgggcaggtggctggaacacttgttttttt

SEQ ID NO: 3951 - RNA, 133 nt, synthetic construct
  source 1..133: mol_type = other RNA
gttgccaagtgttccagccacgttttagagctagaaatagcaagttaaaataaggctagtccgttatcaacttgaaaaagtggcaccgagtcggtgcttcattgccctgggtaggtggctggaacattttttt

SEQ ID NO: 3952 - RNA, 133 nt, synthetic construct
  source 1..133: mol_type = other RNA
gttgccaagtgttccagccacgttttagagctagaaatagcaagttaaaataaggctagtccgttatcaacttgaaaaagtggcaccgagtcggtgctgccctgggacggtggctggaacacttggttttttt

SEQ ID NO: 3953 - RNA, 133 nt, synthetic construct
  source 1..133: mol_type = other RNA
gttgccaagtgttccagccacgttttagagctagaaatagcaagttaaaataaggctagtccgttatcaacttgaaaaagtggcaccgagtcggtgcttcattgccctgggtcggtggctggaacattttttt

SEQ ID NO: 3954 - RNA, 133 nt, synthetic construct
  source 1..133: mol_type = other RNA
gttgccaagtgttccagccacgttttagagctagaaatagcaagttaaaataaggctagtccgttatcaacttgaaaaagtggcaccgagtcggtgctgccctgggtaggtggctggaacacttggttttttt

SEQ ID NO: 3955 - RNA, 133 nt, synthetic construct
  source 1..133: mol_type = other RNA
gttgccaagtgttccagccacgttttagagctagaaatagcaagttaaaataaggctagtccgttatcaacttgaaaaagtggcaccgagtcggtgcttgccctgggccggtggctggaacacttgttttttt

SEQ ID NO: 3956 - RNA, 133 nt, synthetic construct
  source 1..133: mol_type = other RNA
gttgccaagtgttccagccacgttttagagctagaaatagcaagttaaaataaggctagtccgttatcaacttgaaaaagtggcaccgagtcggtgctcattgccctgggccggtggctggaacacttttttt

SEQ ID NO: 3957 - RNA, 133 nt, synthetic construct
  source 1..133: mol_type = other RNA
gttgccaagtgttccagccacgttttagagctagaaatagcaagttaaaataaggctagtccgttatcaacttgaaaaagtggcaccgagtcggtgctcattgccctggggcggtggctggaacacttttttt

SEQ ID NO: 3958 - RNA, 133 nt, synthetic construct
  source 1..133: mol_type = other RNA
gttgccaagtgttccagccacgttttagagctagaaatagcaagttaaaataaggctagtccgttatcaacttgaaaaagtggcaccgagtcggtgcattgccctgggtcggtggctggaacacttttttttt

SEQ ID NO: 3959 - RNA, 133 nt, synthetic construct
  source 1..133: mol_type = other RNA
gttgccaagtgttccagccacgttttagagctagaaatagcaagttaaaataaggctagtccgttatcaacttgaaaaagtggcaccgagtcggtgcttcattgccctgggcaggtggctggaacattttttt

SEQ ID NO: 3960 - RNA, 133 nt, synthetic construct
  source 1..133: mol_type = other RNA
gttgccaagtgttccagccacgttttagagctagaaatagcaagttaaaataaggctagtccgttatcaacttgaaaaagtggcaccgagtcggtgcttcattgccctgggacggtggctggaacattttttt

SEQ ID NO: 3961 - RNA, 133 nt, synthetic construct
  source 1..133: mol_type = other RNA
gttgccaagtgttccagccacgttttagagctagaaatagcaagttaaaataaggctagtccgttatcaacttgaaaaagtggcaccgagtcggtgcattgccctgggcaggtggctggaacacttttttttt

SEQ ID NO: 3962 - RNA, 133 nt, synthetic construct
  source 1..133: mol_type = other RNA
gttgccaagtgttccagccacgttttagagctagaaatagcaagttaaaataaggctagtccgttatcaacttgaaaaagtggcaccgagtcggtgcttcattgccctgggccggtggctggaacattttttt

SEQ ID NO: 3963 - RNA, 133 nt, synthetic construct
  source 1..133: mol_type = other RNA
gttgccaagtgttccagccacgttttagagctagaaatagcaagttaaaataaggctagtccgttatcaacttgaaaaagtggcaccgagtcggtgcattgccctggggcggtggctggaacacttttttttt

SEQ ID NO: 3964 - RNA, 133 nt, synthetic construct
  source 1..133: mol_type = other RNA
gttgccaagtgttccagccacgttttagagctagaaatagcaagttaaaataaggctagtccgttatcaacttgaaaaagtggcaccgagtcggtgcttgccctgggtcggtggctggaacacttgttttttt

SEQ ID NO: 3965 - RNA, 133 nt, synthetic construct
  source 1..133: mol_type = other RNA
gttgccaagtgttccagccacgttttagagctagaaatagcaagttaaaataaggctagtccgttatcaacttgaaaaagtggcaccgagtcggtgctgccctgggtcggtggctggaacacttggttttttt

SEQ ID NO: 3966 - RNA, 133 nt, synthetic construct
  source 1..133: mol_type = other RNA
gttgccaagtgttccagccacgttttagagctagaaatagcaagttaaaataaggctagtccgttatcaacttgaaaaagtggcaccgagtcggtgctcattgccctgggcaggtggctggaacacttttttt

SEQ ID NO: 3967 - RNA, 133 nt, synthetic construct
  source 1..133: mol_type = other RNA
gttgccaagtgttccagccacgttttagagctagaaatagcaagttaaaataaggctagtccgttatcaacttgaaaaagtggcaccgagtcggtgctgccctgggccggtggctggaacacttggttttttt

SEQ ID NO: 3968 - RNA, 133 nt, synthetic construct
  source 1..133: mol_type = other RNA
gttgccaagtgttccagccacgttttagagctagaaatagcaagttaaaataaggctagtccgttatcaacttgaaaaagtggcaccgagtcggtgcttcattgccctgggaaggtggctggaacattttttt

SEQ ID NO: 3969 - RNA, 133 nt, synthetic construct
  source 1..133: mol_type = other RNA
gttgccaagtgttccagccacgttttagagctagaaatagcaagttaaaataaggctagtccgttatcaacttgaaaaagtggcaccgagtcggtgctcattgccctgggacggtggctggaacacttttttt

SEQ ID NO: 3970 - RNA, 133 nt, synthetic construct
  source 1..133: mol_type = other RNA
gttgccaagtgttccagccacgttttagagctagaaatagcaagttaaaataaggctagtccgttatcaacttgaaaaagtggcaccgagtcggtgctgccctgggcaggtggctggaacacttggttttttt

SEQ ID NO: 3971 - RNA, 133 nt, synthetic construct
  source 1..133: mol_type = other RNA
gttgccaagtgttccagccacgttttagagctagaaatagcaagttaaaataaggctagtccgttatcaacttgaaaaagtggcaccgagtcggtgcattgccctgggtaggtggctggaacacttttttttt

SEQ ID NO: 3972 - RNA, 133 nt, synthetic construct
  source 1..133: mol_type = other RNA
gttgccaagtgttccagccacgttttagagctagaaatagcaagttaaaataaggctagtccgttatcaacttgaaaaagtggcaccgagtcggtgctcattgccctgggtcggtggctggaacacttttttt

SEQ ID NO: 3973 - RNA, 133 nt, synthetic construct
  source 1..133: mol_type = other RNA
gttgccaagtgttccagccacgttttagagctagaaatagcaagttaaaataaggctagtccgttatcaacttgaaaaagtggcaccgagtcggtgctgccctgggaaggtggctggaacacttggttttttt

SEQ ID NO: 3974 - RNA, 133 nt, synthetic construct
  source 1..133: mol_type = other RNA
gttgccaagtgttccagccacgttttagagctagaaatagcaagttaaaataaggctagtccgttatcaacttgaaaaagtggcaccgagtcggtgcttgccctgggtaggtggctggaacacttgttttttt

SEQ ID NO: 3975 - RNA, 133 nt, synthetic construct
  source 1..133: mol_type = other RNA
gttgccaagtgttccagccacgttttagagctagaaatagcaagttaaaataaggctagtccgttatcaacttgaaaaagtggcaccgagtcggtgcttgccctgggaaggtggctggaacacttgttttttt

SEQ ID NO: 3976 - RNA, 133 nt, synthetic construct
  source 1..133: mol_type = other RNA
gttgccaagtgttccagccacgttttagagctagaaatagcaagttaaaataaggctagtccgttatcaacttgaaaaagtggcaccgagtcggtgcttgccctggggcggtggctggaacacttgttttttt

SEQ ID NO: 3977 - RNA, 133 nt, synthetic construct
  source 1..133: mol_type = other RNA
gttgccaagtgttccagccacgttttagagctagaaatagcaagttaaaataaggctagtccgttatcaacttgaaaaagtggcaccgagtcggtgctcattgccctggggaggtggctggaacacttttttt

SEQ ID NO: 3978 - RNA, 133 nt, synthetic construct
  source 1..133: mol_type = other RNA
gttgccaagtgttccagccacgttttagagctagaaatagcaagttaaaataaggctagtccgttatcaacttgaaaaagtggcaccgagtcggtgcttcattgccctggggaggtggctggaacattttttt

SEQ ID NO: 3979 - RNA, 133 nt, synthetic construct
  source 1..133: mol_type = other RNA
gttgccaagtgttccagccacgttttagagctagaaatagcaagttaaaataaggctagtccgttatcaacttgaaaaagtggcaccgagtcggtgcttgccctggggaggtggctggaacacttgttttttt

SEQ ID NO: 3980 - RNA, 133 nt, synthetic construct
  source 1..133: mol_type = other RNA
gttgccaagtgttccagccacgttttagagctagaaatagcaagttaaaataaggctagtccgttatcaacttgaaaaagtggcaccgagtcggtgcttgccctgggacggtggctggaacacttgttttttt

SEQ ID NO: 3981 - RNA, 133 nt, synthetic construct
  source 1..133: mol_type = other RNA
gttgccaagtgttccagccacgttttagagctagaaatagcaagttaaaataaggctagtccgttatcaacttgaaaaagtggcaccgagtcggtgctgccctggggcggtggctggaacacttggttttttt

SEQ ID NO: 3982 - RNA, 133 nt, synthetic construct
  source 1..133: mol_type = other RNA
gttgccaagtgttccagccacgttttagagctagaaatagcaagttaaaataaggctagtccgttatcaacttgaaaaagtggcaccgagtcggtgcattgccctgggacggtggctggaacacttttttttt

SEQ ID NO: 3983 - RNA, 133 nt, synthetic construct
  source 1..133: mol_type = other RNA
gttgccaagtgttccagccacgttttagagctagaaatagcaagttaaaataaggctagtccgttatcaacttgaaaaagtggcaccgagtcggtgctcattgccctgggaaggtggctggaacacttttttt

SEQ ID NO: 3984 - RNA, 133 nt, synthetic construct
  source 1..133: mol_type = other RNA
gttgccaagtgttccagccacgttttagagctagaaatagcaagttaaaataaggctagtccgttatcaacttgaaaaagtggcaccgagtcggtgctgccctggggaggtggctggaacacttggttttttt

SEQ ID NO: 3985 - RNA, 133 nt, synthetic construct
  source 1..133: mol_type = other RNA
gttgccaagtgttccagccacgttttagagctagaaatagcaagttaaaataaggctagtccgttatcaacttgaaaaagtggcaccgagtcggtgcattgccctgggccggtggctggaacacttttttttt

SEQ ID NO: 3986 - RNA, 133 nt, synthetic construct
  source 1..133: mol_type = other RNA
gttgccaagtgttccagccacgttttagagctagaaatagcaagttaaaataaggctagtccgttatcaacttgaaaaagtggcaccgagtcggtgcattgccctgggaaggtggctggaacacttttttttt

SEQ ID NO: 3987 - RNA, 133 nt, synthetic construct
  source 1..133: mol_type = other RNA
gttgccaagtgttccagccacgttttagagctagaaatagcaagttaaaataaggctagtccgttatcaacttgaaaaagtggcaccgagtcggtgcattgccctggggaggtggctggaacacttttttttt

SEQ ID NO: 3988 - RNA, 134 nt, synthetic construct
  source 1..134: mol_type = other RNA
gttgccaagtgttccagccacgttttagagctagaaatagcaagttaaaataaggctagtccgttatcaacttgaaaaagtggcaccgagtcggtgctcattgccctgggccggtggctggaacactttttttt

SEQ ID NO: 3989 - RNA, 134 nt, synthetic construct
  source 1..134: mol_type = other RNA
gttgccaagtgttccagccacgttttagagctagaaatagcaagttaaaataaggctagtccgttatcaacttgaaaaagtggcaccgagtcggtgcttgccctgggacggtggctggaacacttggttttttt

SEQ ID NO: 3990 - RNA, 134 nt, synthetic construct
  source 1..134: mol_type = other RNA
gttgccaagtgttccagccacgttttagagctagaaatagcaagttaaaataaggctagtccgttatcaacttgaaaaagtggcaccgagtcggtgcattgccctgggtcggtggctggaacacttgttttttt

SEQ ID NO: 3991 - RNA, 134 nt, synthetic construct
  source 1..134: mol_type = other RNA
gttgccaagtgttccagccacgttttagagctagaaatagcaagttaaaataaggctagtccgttatcaacttgaaaaagtggcaccgagtcggtgcattgccctgggacggtggctggaacacttgttttttt

SEQ ID NO: 3992 - RNA, 134 nt, synthetic construct
  source 1..134: mol_type = other RNA
gttgccaagtgttccagccacgttttagagctagaaatagcaagttaaaataaggctagtccgttatcaacttgaaaaagtggcaccgagtcggtgctcattgccctgggtcggtggctggaacactttttttt

SEQ ID NO: 3993 - RNA, 134 nt, synthetic construct
  source 1..134: mol_type = other RNA
gttgccaagtgttccagccacgttttagagctagaaatagcaagttaaaataaggctagtccgttatcaacttgaaaaagtggcaccgagtcggtgctcattgccctgggaaggtggctggaacactttttttt

SEQ ID NO: 3994 - RNA, 134 nt, synthetic construct
  source 1..134: mol_type = other RNA
gttgccaagtgttccagccacgttttagagctagaaatagcaagttaaaataaggctagtccgttatcaacttgaaaaagtggcaccgagtcggtgcttgccctgggtcggtggctggaacacttggttttttt

SEQ ID NO: 3995 - RNA, 134 nt, synthetic construct
  source 1..134: mol_type = other RNA
gttgccaagtgttccagccacgttttagagctagaaatagcaagttaaaataaggctagtccgttatcaacttgaaaaagtggcaccgagtcggtgcttgccctgggccggtggctggaacacttggttttttt

SEQ ID NO: 3996 - RNA, 134 nt, synthetic construct
  source 1..134: mol_type = other RNA
gttgccaagtgttccagccacgttttagagctagaaatagcaagttaaaataaggctagtccgttatcaacttgaaaaagtggcaccgagtcggtgcattgccctgggcaggtggctggaacacttgttttttt

SEQ ID NO: 3997 - RNA, 134 nt, synthetic construct
  source 1..134: mol_type = other RNA
gttgccaagtgttccagccacgttttagagctagaaatagcaagttaaaataaggctagtccgttatcaacttgaaaaagtggcaccgagtcggtgcttgccctggggcggtggctggaacacttggttttttt

SEQ ID NO: 3998 - RNA, 134 nt, synthetic construct
  source 1..134: mol_type = other RNA
gttgccaagtgttccagccacgttttagagctagaaatagcaagttaaaataaggctagtccgttatcaacttgaaaaagtggcaccgagtcggtgcattgccctgggaaggtggctggaacacttgttttttt

SEQ ID NO: 3999 - RNA, 134 nt, synthetic construct
  source 1..134: mol_type = other RNA
gttgccaagtgttccagccacgttttagagctagaaatagcaagttaaaataaggctagtccgttatcaacttgaaaaagtggcaccgagtcggtgctcattgccctggggcggtggctggaacactttttttt

SEQ ID NO: 4000 - RNA, 134 nt, synthetic construct
  source 1..134: mol_type = other RNA
gttgccaagtgttccagccacgttttagagctagaaatagcaagttaaaataaggctagtccgttatcaacttgaaaaagtggcaccgagtcggtgctcattgccctggggaggtggctggaacactttttttt

SEQ ID NO: 4001 - RNA, 134 nt, synthetic construct
  source 1..134: mol_type = other RNA
gttgccaagtgttccagccacgttttagagctagaaatagcaagttaaaataaggctagtccgttatcaacttgaaaaagtggcaccgagtcggtgcttgccctgggtaggtggctggaacacttggttttttt

SEQ ID NO: 4002 - RNA, 134 nt, synthetic construct
  source 1..134: mol_type = other RNA
gttgccaagtgttccagccacgttttagagctagaaatagcaagttaaaataaggctagtccgttatcaacttgaaaaagtggcaccgagtcggtgcattgccctggggcggtggctggaacacttgttttttt

SEQ ID NO: 4003 - RNA, 134 nt, synthetic construct
  source 1..134: mol_type = other RNA
gttgccaagtgttccagccacgttttagagctagaaatagcaagttaaaataaggctagtccgttatcaacttgaaaaagtggcaccgagtcggtgcttgccctgggcaggtggctggaacacttggttttttt

SEQ ID NO: 4004 - RNA, 134 nt, synthetic construct
  source 1..134: mol_type = other RNA
gttgccaagtgttccagccacgttttagagctagaaatagcaagttaaaataaggctagtccgttatcaacttgaaaaagtggcaccgagtcggtgcattgccctgggtaggtggctggaacacttgttttttt

SEQ ID NO: 4005 - RNA, 134 nt, synthetic construct
  source 1..134: mol_type = other RNA
gttgccaagtgttccagccacgttttagagctagaaatagcaagttaaaataaggctagtccgttatcaacttgaaaaagtggcaccgagtcggtgcttgccctgggaaggtggctggaacacttggttttttt

SEQ ID NO: 4006 - RNA, 134 nt, synthetic construct
  source 1..134: mol_type = other RNA
gttgccaagtgttccagccacgttttagagctagaaatagcaagttaaaataaggctagtccgttatcaacttgaaaaagtggcaccgagtcggtgcattgccctggggaggtggctggaacacttgttttttt

SEQ ID NO: 4007 - RNA, 134 nt, synthetic construct
  source 1..134: mol_type = other RNA
gttgccaagtgttccagccacgttttagagctagaaatagcaagttaaaataaggctagtccgttatcaacttgaaaaagtggcaccgagtcggtgcttgccctggggaggtggctggaacacttggttttttt

SEQ ID NO: 4008 - RNA, 134 nt, synthetic construct
  source 1..134: mol_type = other RNA
gttgccaagtgttccagccacgttttagagctagaaatagcaagttaaaataaggctagtccgttatcaacttgaaaaagtggcaccgagtcggtgcattgccctgggccggtggctggaacacttgttttttt

SEQ ID NO: 4009 - RNA, 134 nt, synthetic construct
  source 1..134: mol_type = other RNA
gttgccaagtgttccagccacgttttagagctagaaatagcaagttaaaataaggctagtccgttatcaacttgaaaaagtggcaccgagtcggtgcttcattgccctggggcggtggctggaacacttttttt

SEQ ID NO: 4010 - RNA, 134 nt, synthetic construct
  source 1..134: mol_type = other RNA
gttgccaagtgttccagccacgttttagagctagaaatagcaagttaaaataaggctagtccgttatcaacttgaaaaagtggcaccgagtcggtgcttcattgccctgggcaggtggctggaacacttttttt

SEQ ID NO: 4011 - RNA, 134 nt, synthetic construct
  source 1..134: mol_type = other RNA
gttgccaagtgttccagccacgttttagagctagaaatagcaagttaaaataaggctagtccgttatcaacttgaaaaagtggcaccgagtcggtgcttcattgccctggggaggtggctggaacacttttttt

SEQ ID NO: 4012 - RNA, 134 nt, synthetic construct
  source 1..134: mol_type = other RNA
gttgccaagtgttccagccacgttttagagctagaaatagcaagttaaaataaggctagtccgttatcaacttgaaaaagtggcaccgagtcggtgcttcattgccctgggtaggtggctggaacacttttttt

SEQ ID NO: 4013 - RNA, 134 nt, synthetic construct
  source 1..134: mol_type = other RNA
gttgccaagtgttccagccacgttttagagctagaaatagcaagttaaaataaggctagtccgttatcaacttgaaaaagtggcaccgagtcggtgcttcattgccctgggccggtggctggaacacttttttt

SEQ ID NO: 4014 - RNA, 134 nt, synthetic construct
  source 1..134: mol_type = other RNA
gttgccaagtgttccagccacgttttagagctagaaatagcaagttaaaataaggctagtccgttatcaacttgaaaaagtggcaccgagtcggtgcttcattgccctgggtcggtggctggaacacttttttt

SEQ ID NO: 4015 - RNA, 134 nt, synthetic construct
  source 1..134: mol_type = other RNA
gttgccaagtgttccagccacgttttagagctagaaatagcaagttaaaataaggctagtccgttatcaacttgaaaaagtggcaccgagtcggtgctcattgccctgggcaggtggctggaacactttttttt

SEQ ID NO: 4016 - RNA, 134 nt, synthetic construct
  source 1..134: mol_type = other RNA
gttgccaagtgttccagccacgttttagagctagaaatagcaagttaaaataaggctagtccgttatcaacttgaaaaagtggcaccgagtcggtgcttcattgccctgggacggtggctggaacacttttttt

SEQ ID NO: 4017 - RNA, 134 nt, synthetic construct
  source 1..134: mol_type = other RNA
gttgccaagtgttccagccacgttttagagctagaaatagcaagttaaaataaggctagtccgttatcaacttgaaaaagtggcaccgagtcggtgctcattgccctgggacggtggctggaacactttttttt

SEQ ID NO: 4018 - RNA, 134 nt, synthetic construct
  source 1..134: mol_type = other RNA
gttgccaagtgttccagccacgttttagagctagaaatagcaagttaaaataaggctagtccgttatcaacttgaaaaagtggcaccgagtcggtgctcattgccctgggtaggtggctggaacactttttttt

SEQ ID NO: 4019 - RNA, 134 nt, synthetic construct
  source 1..134: mol_type = other RNA
gttgccaagtgttccagccacgttttagagctagaaatagcaagttaaaataaggctagtccgttatcaacttgaaaaagtggcaccgagtcggtgcttcattgccctgggaaggtggctggaacacttttttt

SEQ ID NO: 4020 - RNA, 135 nt, synthetic construct
  source 1..135: mol_type = other RNA
gttgccaagtgttccagccacgttttagagctagaaatagcaagttaaaataaggctagtccgttatcaacttgaaaaagtggcaccgagtcggtgcttcattgccctgggccggtggctggaacactttttttt

SEQ ID NO: 4021 - RNA, 135 nt, synthetic construct
  source 1..135: mol_type = other RNA
gttgccaagtgttccagccacgttttagagctagaaatagcaagttaaaataaggctagtccgttatcaacttgaaaaagtggcaccgagtcggtgctcattgccctgggccggtggctggaacacttttttttt

SEQ ID NO: 4022 - RNA, 135 nt, synthetic construct
  source 1..135: mol_type = other RNA
gttgccaagtgttccagccacgttttagagctagaaatagcaagttaaaataaggctagtccgttatcaacttgaaaaagtggcaccgagtcggtgcattgccctggggaggtggctggaacacttggttttttt

SEQ ID NO: 4023 - RNA, 135 nt, synthetic construct
  source 1..135: mol_type = other RNA
gttgccaagtgttccagccacgttttagagctagaaatagcaagttaaaataaggctagtccgttatcaacttgaaaaagtggcaccgagtcggtgcttcattgccctggggaggtggctggaacactttttttt

SEQ ID NO: 4024 - RNA, 135 nt, synthetic construct
  source 1..135: mol_type = other RNA
gttgccaagtgttccagccacgttttagagctagaaatagcaagttaaaataaggctagtccgttatcaacttgaaaaagtggcaccgagtcggtgcattgccctggggcggtggctggaacacttggttttttt

SEQ ID NO: 4025 - RNA, 135 nt, synthetic construct
  source 1..135: mol_type = other RNA
gttgccaagtgttccagccacgttttagagctagaaatagcaagttaaaataaggctagtccgttatcaacttgaaaaagtggcaccgagtcggtgcttcattgccctggggcggtggctggaacactttttttt

SEQ ID NO: 4026 - RNA, 135 nt, synthetic construct
  source 1..135: mol_type = other RNA
gttgccaagtgttccagccacgttttagagctagaaatagcaagttaaaataaggctagtccgttatcaacttgaaaaagtggcaccgagtcggtgctcattgccctggggaggtggctggaacacttttttttt

SEQ ID NO: 4027 - RNA, 135 nt, synthetic construct
  source 1..135: mol_type = other RNA
gttgccaagtgttccagccacgttttagagctagaaatagcaagttaaaataaggctagtccgttatcaacttgaaaaagtggcaccgagtcggtgctcattgccctggggcggtggctggaacacttttttttt

SEQ ID NO: 4028 - RNA, 135 nt, synthetic construct
  source 1..135: mol_type = other RNA
gttgccaagtgttccagccacgttttagagctagaaatagcaagttaaaataaggctagtccgttatcaacttgaaaaagtggcaccgagtcggtgcattgccctgggaaggtggctggaacacttggttttttt

SEQ ID NO: 4029 - RNA, 135 nt, synthetic construct
  source 1..135: mol_type = other RNA
gttgccaagtgttccagccacgttttagagctagaaatagcaagttaaaataaggctagtccgttatcaacttgaaaaagtggcaccgagtcggtgctcattgccctgggtaggtggctggaacacttttttttt

SEQ ID NO: 4030 - RNA, 135 nt, synthetic construct
  source 1..135: mol_type = other RNA
gttgccaagtgttccagccacgttttagagctagaaatagcaagttaaaataaggctagtccgttatcaacttgaaaaagtggcaccgagtcggtgcattgccctgggtaggtggctggaacacttggttttttt

SEQ ID NO: 4031 - RNA, 135 nt, synthetic construct
  source 1..135: mol_type = other RNA
gttgccaagtgttccagccacgttttagagctagaaatagcaagttaaaataaggctagtccgttatcaacttgaaaaagtggcaccgagtcggtgctcattgccctgggaaggtggctggaacacttttttttt

SEQ ID NO: 4032 - RNA, 135 nt, synthetic construct
  source 1..135: mol_type = other RNA
gttgccaagtgttccagccacgttttagagctagaaatagcaagttaaaataaggctagtccgttatcaacttgaaaaagtggcaccgagtcggtgcttcattgccctgggtcggtggctggaacactttttttt

SEQ ID NO: 4033 - RNA, 135 nt, synthetic construct
  source 1..135: mol_type = other RNA
gttgccaagtgttccagccacgttttagagctagaaatagcaagttaaaataaggctagtccgttatcaacttgaaaaagtggcaccgagtcggtgcttcattgccctgggtaggtggctggaacactttttttt

SEQ ID NO: 4034 - RNA, 135 nt, synthetic construct
  source 1..135: mol_type = other RNA
gttgccaagtgttccagccacgttttagagctagaaatagcaagttaaaataaggctagtccgttatcaacttgaaaaagtggcaccgagtcggtgctcattgccctgggtcggtggctggaacacttttttttt

SEQ ID NO: 4035 - RNA, 135 nt, synthetic construct
  source 1..135: mol_type = other RNA
gttgccaagtgttccagccacgttttagagctagaaatagcaagttaaaataaggctagtccgttatcaacttgaaaaagtggcaccgagtcggtgcattgccctgggtcggtggctggaacacttggttttttt

SEQ ID NO: 4036 - RNA, 135 nt, synthetic construct
  source 1..135: mol_type = other RNA
gttgccaagtgttccagccacgttttagagctagaaatagcaagttaaaataaggctagtccgttatcaacttgaaaaagtggcaccgagtcggtgcttcattgccctgggcaggtggctggaacactttttttt

SEQ ID NO: 4037 - RNA, 135 nt, synthetic construct
  source 1..135: mol_type = other RNA
gttgccaagtgttccagccacgttttagagctagaaatagcaagttaaaataaggctagtccgttatcaacttgaaaaagtggcaccgagtcggtgctcattgccctgggacggtggctggaacacttttttttt

SEQ ID NO: 4038 - RNA, 135 nt, synthetic construct
  source 1..135: mol_type = other RNA
gttgccaagtgttccagccacgttttagagctagaaatagcaagttaaaataaggctagtccgttatcaacttgaaaaagtggcaccgagtcggtgctcattgccctgggcaggtggctggaacacttttttttt

SEQ ID NO: 4039 - RNA, 135 nt, synthetic construct
  source 1..135: mol_type = other RNA
gttgccaagtgttccagccacgttttagagctagaaatagcaagttaaaataaggctagtccgttatcaacttgaaaaagtggcaccgagtcggtgcttcattgccctgggacggtggctggaacactttttttt

SEQ ID NO: 4040 - RNA, 135 nt, synthetic construct
  source 1..135: mol_type = other RNA
gttgccaagtgttccagccacgttttagagctagaaatagcaagttaaaataaggctagtccgttatcaacttgaaaaagtggcaccgagtcggtgcattgccctgggcaggtggctggaacacttggttttttt

SEQ ID NO: 4041 - RNA, 135 nt, synthetic construct
  source 1..135: mol_type = other RNA
gttgccaagtgttccagccacgttttagagctagaaatagcaagttaaaataaggctagtccgttatcaacttgaaaaagtggcaccgagtcggtgcttcattgccctgggaaggtggctggaacactttttttt

SEQ ID NO: 4042 - RNA, 135 nt, synthetic construct
  source 1..135: mol_type = other RNA
gttgccaagtgttccagccacgttttagagctagaaatagcaagttaaaataaggctagtccgttatcaacttgaaaaagtggcaccgagtcggtgcattgccctgggacggtggctggaacacttggttttttt

SEQ ID NO: 4043 - RNA, 135 nt, synthetic construct
  source 1..135: mol_type = other RNA
gttgccaagtgttccagccacgttttagagctagaaatagcaagttaaaataaggctagtccgttatcaacttgaaaaagtggcaccgagtcggtgcattgccctgggccggtggctggaacacttggttttttt

SEQ ID NO: 4044 - RNA, 136 nt, synthetic construct
  source 1..136: mol_type = other RNA
gttgccaagtgttccagccacgttttagagctagaaatagcaagttaaaataaggctagtccgttatcaacttgaaaaagtggcaccgagtcggtgcttcattgccctgggtaggtggctggaacacttttttttt

SEQ ID NO: 4045 - RNA, 136 nt, synthetic construct
  source 1..136: mol_type = other RNA
gttgccaagtgttccagccacgttttagagctagaaatagcaagttaaaataaggctagtccgttatcaacttgaaaaagtggcaccgagtcggtgctcattgccctgggacggtggctggaacacttgttttttt

SEQ ID NO: 4046 - RNA, 136 nt, synthetic construct
  source 1..136: mol_type = other RNA
gttgccaagtgttccagccacgttttagagctagaaatagcaagttaaaataaggctagtccgttatcaacttgaaaaagtggcaccgagtcggtgctcattgccctggggcggtggctggaacacttgttttttt

SEQ ID NO: 4047 - RNA, 136 nt, synthetic construct
  source 1..136: mol_type = other RNA
gttgccaagtgttccagccacgttttagagctagaaatagcaagttaaaataaggctagtccgttatcaacttgaaaaagtggcaccgagtcggtgctcattgccctgggccggtggctggaacacttgttttttt

SEQ ID NO: 4048 - RNA, 136 nt, synthetic construct
  source 1..136: mol_type = other RNA
gttgccaagtgttccagccacgttttagagctagaaatagcaagttaaaataaggctagtccgttatcaacttgaaaaagtggcaccgagtcggtgctcattgccctgggaaggtggctggaacacttgttttttt

SEQ ID NO: 4049 - RNA, 136 nt, synthetic construct
  source 1..136: mol_type = other RNA
gttgccaagtgttccagccacgttttagagctagaaatagcaagttaaaataaggctagtccgttatcaacttgaaaaagtggcaccgagtcggtgcttcattgccctgggtcggtggctggaacacttttttttt

SEQ ID NO: 4050 - RNA, 136 nt, synthetic construct
  source 1..136: mol_type = other RNA
gttgccaagtgttccagccacgttttagagctagaaatagcaagttaaaataaggctagtccgttatcaacttgaaaaagtggcaccgagtcggtgctcattgccctgggtaggtggctggaacacttgttttttt

SEQ ID NO: 4051 - RNA, 136 nt, synthetic construct
  source 1..136: mol_type = other RNA
gttgccaagtgttccagccacgttttagagctagaaatagcaagttaaaataaggctagtccgttatcaacttgaaaaagtggcaccgagtcggtgcttcattgccctgggccggtggctggaacacttttttttt

SEQ ID NO: 4052 - RNA, 136 nt, synthetic construct
  source 1..136: mol_type = other RNA
gttgccaagtgttccagccacgttttagagctagaaatagcaagttaaaataaggctagtccgttatcaacttgaaaaagtggcaccgagtcggtgcttcattgccctggggaggtggctggaacacttttttttt

SEQ ID NO: 4053 - RNA, 136 nt, synthetic construct
  source 1..136: mol_type = other RNA
gttgccaagtgttccagccacgttttagagctagaaatagcaagttaaaataaggctagtccgttatcaacttgaaaaagtggcaccgagtcggtgctcattgccctgggtcggtggctggaacacttgttttttt

SEQ ID NO: 4054 - RNA, 136 nt, synthetic construct
  source 1..136: mol_type = other RNA
gttgccaagtgttccagccacgttttagagctagaaatagcaagttaaaataaggctagtccgttatcaacttgaaaaagtggcaccgagtcggtgcttcattgccctgggcaggtggctggaacacttttttttt

SEQ ID NO: 4055 - RNA, 136 nt, synthetic construct
  source 1..136: mol_type = other RNA
gttgccaagtgttccagccacgttttagagctagaaatagcaagttaaaataaggctagtccgttatcaacttgaaaaagtggcaccgagtcggtgcttcattgccctgggaaggtggctggaacacttttttttt

SEQ ID NO: 4056 - RNA, 136 nt, synthetic construct
  source 1..136: mol_type = other RNA
gttgccaagtgttccagccacgttttagagctagaaatagcaagttaaaataaggctagtccgttatcaacttgaaaaagtggcaccgagtcggtgctcattgccctgggcaggtggctggaacacttgttttttt

SEQ ID NO: 4057 - RNA, 136 nt, synthetic construct
  source 1..136: mol_type = other RNA
gttgccaagtgttccagccacgttttagagctagaaatagcaagttaaaataaggctagtccgttatcaacttgaaaaagtggcaccgagtcggtgcttcattgccctggggcggtggctggaacacttttttttt

SEQ ID NO: 4058 - RNA, 136 nt, synthetic construct
  source 1..136: mol_type = other RNA
gttgccaagtgttccagccacgttttagagctagaaatagcaagttaaaataaggctagtccgttatcaacttgaaaaagtggcaccgagtcggtgcttcattgccctgggacggtggctggaacacttttttttt

SEQ ID NO: 4059 - RNA, 136 nt, synthetic construct
  source 1..136: mol_type = other RNA
gttgccaagtgttccagccacgttttagagctagaaatagcaagttaaaataaggctagtccgttatcaacttgaaaaagtggcaccgagtcggtgctcattgccctggggaggtggctggaacacttgttttttt

SEQ ID NO: 4060 - RNA, 137 nt, synthetic construct
  source 1..137: mol_type = other RNA
gttgccaagtgttccagccacgttttagagctagaaatagcaagttaaaataaggctagtccgttatcaacttgaaaaagtggcaccgagtcggtgctcattgccctgggacggtggctggaacacttggttttttt

SEQ ID NO: 4061 - RNA, 137 nt, synthetic construct
  source 1..137: mol_type = other RNA
gttgccaagtgttccagccacgttttagagctagaaatagcaagttaaaataaggctagtccgttatcaacttgaaaaagtggcaccgagtcggtgcttcattgccctggggaggtggctggaacacttgttttttt

SEQ ID NO: 4062 - RNA, 137 nt, synthetic construct
  source 1..137: mol_type = other RNA
gttgccaagtgttccagccacgttttagagctagaaatagcaagttaaaataaggctagtccgttatcaacttgaaaaagtggcaccgagtcggtgcttcattgccctggggcggtggctggaacacttgttttttt

SEQ ID NO: 4063 - RNA, 137 nt, synthetic construct
  source 1..137: mol_type = other RNA
gttgccaagtgttccagccacgttttagagctagaaatagcaagttaaaataaggctagtccgttatcaacttgaaaaagtggcaccgagtcggtgctcattgccctgggtcggtggctggaacacttggttttttt

SEQ ID NO: 4064 - RNA, 137 nt, synthetic construct
  source 1..137: mol_type = other RNA
gttgccaagtgttccagccacgttttagagctagaaatagcaagttaaaataaggctagtccgttatcaacttgaaaaagtggcaccgagtcggtgcttcattgccctgggtcggtggctggaacacttgttttttt

SEQ ID NO: 4065 - RNA, 137 nt, synthetic construct
  source 1..137: mol_type = other RNA
gttgccaagtgttccagccacgttttagagctagaaatagcaagttaaaataaggctagtccgttatcaacttgaaaaagtggcaccgagtcggtgcttcattgccctgggcaggtggctggaacacttgttttttt

SEQ ID NO: 4066 - RNA, 137 nt, synthetic construct
  source 1..137: mol_type = other RNA
gttgccaagtgttccagccacgttttagagctagaaatagcaagttaaaataaggctagtccgttatcaacttgaaaaagtggcaccgagtcggtgctcattgccctggggcggtggctggaacacttggttttttt

SEQ ID NO: 4067 - RNA, 137 nt, synthetic construct
  source 1..137: mol_type = other RNA
gttgccaagtgttccagccacgttttagagctagaaatagcaagttaaaataaggctagtccgttatcaacttgaaaaagtggcaccgagtcggtgctcattgccctgggcaggtggctggaacacttggttttttt

SEQ ID NO: 4068 - RNA, 137 nt, synthetic construct
  source 1..137: mol_type = other RNA
gttgccaagtgttccagccacgttttagagctagaaatagcaagttaaaataaggctagtccgttatcaacttgaaaaagtggcaccgagtcggtgcttcattgccctgggtaggtggctggaacacttgttttttt

SEQ ID NO: 4069 - RNA, 137 nt, synthetic construct
  source 1..137: mol_type = other RNA
gttgccaagtgttccagccacgttttagagctagaaatagcaagttaaaataaggctagtccgttatcaacttgaaaaagtggcaccgagtcggtgcttcattgccctgggaaggtggctggaacacttgttttttt

SEQ ID NO: 4070 - RNA, 137 nt, synthetic construct
  source 1..137: mol_type = other RNA
gttgccaagtgttccagccacgttttagagctagaaatagcaagttaaaataaggctagtccgttatcaacttgaaaaagtggcaccgagtcggtgctcattgccctgggccggtggctggaacacttggttttttt

SEQ ID NO: 4071 - RNA, 137 nt, synthetic construct
  source 1..137: mol_type = other RNA
gttgccaagtgttccagccacgttttagagctagaaatagcaagttaaaataaggctagtccgttatcaacttgaaaaagtggcaccgagtcggtgcttcattgccctgggccggtggctggaacacttgttttttt

SEQ ID NO: 4072 - RNA, 137 nt, synthetic construct
  source 1..137: mol_type = other RNA
gttgccaagtgttccagccacgttttagagctagaaatagcaagttaaaataaggctagtccgttatcaacttgaaaaagtggcaccgagtcggtgcttcattgccctgggacggtggctggaacacttgttttttt

SEQ ID NO: 4073 - RNA, 137 nt, synthetic construct
  source 1..137: mol_type = other RNA
gttgccaagtgttccagccacgttttagagctagaaatagcaagttaaaataaggctagtccgttatcaacttgaaaaagtggcaccgagtcggtgctcattgccctggggaggtggctggaacacttggttttttt

SEQ ID NO: 4074 - RNA, 137 nt, synthetic construct
  source 1..137: mol_type = other RNA
gttgccaagtgttccagccacgttttagagctagaaatagcaagttaaaataaggctagtccgttatcaacttgaaaaagtggcaccgagtcggtgctcattgccctgggaaggtggctggaacacttggttttttt

SEQ ID NO: 4075 - RNA, 137 nt, synthetic construct
  source 1..137: mol_type = other RNA
gttgccaagtgttccagccacgttttagagctagaaatagcaagttaaaataaggctagtccgttatcaacttgaaaaagtggcaccgagtcggtgctcattgccctgggtaggtggctggaacacttggttttttt

SEQ ID NO: 4076 - RNA, 138 nt, synthetic construct
  source 1..138: mol_type = other RNA
gttgccaagtgttccagccacgttttagagctagaaatagcaagttaaaataaggctagtccgttatcaacttgaaaaagtggcaccgagtcggtgcttcattgccctgggtcggtggctggaacacttggttttttt

SEQ ID NO: 4077 - RNA, 138 nt, synthetic construct
  source 1..138: mol_type = other RNA
gttgccaagtgttccagccacgttttagagctagaaatagcaagttaaaataaggctagtccgttatcaacttgaaaaagtggcaccgagtcggtgcttcattgccctgggacggtggctggaacacttggttttttt

SEQ ID NO: 4078 - RNA, 138 nt, synthetic construct
  source 1..138: mol_type = other RNA
gttgccaagtgttccagccacgttttagagctagaaatagcaagttaaaataaggctagtccgttatcaacttgaaaaagtggcaccgagtcggtgcttcattgccctggggcggtggctggaacacttggttttttt

SEQ ID NO: 4079 - RNA, 138 nt, synthetic construct
  source 1..138: mol_type = other RNA
gttgccaagtgttccagccacgttttagagctagaaatagcaagttaaaataaggctagtccgttatcaacttgaaaaagtggcaccgagtcggtgcttcattgccctgggtaggtggctggaacacttggttttttt

SEQ ID NO: 4080 - RNA, 138 nt, synthetic construct
  source 1..138: mol_type = other RNA
gttgccaagtgttccagccacgttttagagctagaaatagcaagttaaaataaggctagtccgttatcaacttgaaaaagtggcaccgagtcggtgcttcattgccctgggcaggtggctggaacacttggttttttt

SEQ ID NO: 4081 - RNA, 138 nt, synthetic construct
  source 1..138: mol_type = other RNA
gttgccaagtgttccagccacgttttagagctagaaatagcaagttaaaataaggctagtccgttatcaacttgaaaaagtggcaccgagtcggtgcttcattgccctgggaaggtggctggaacacttggttttttt

SEQ ID NO: 4082 - RNA, 138 nt, synthetic construct
  source 1..138: mol_type = other RNA
gttgccaagtgttccagccacgttttagagctagaaatagcaagttaaaataaggctagtccgttatcaacttgaaaaagtggcaccgagtcggtgcttcattgccctgggccggtggctggaacacttggttttttt

SEQ ID NO: 4083 - RNA, 138 nt, synthetic construct
  source 1..138: mol_type = other RNA
gttgccaagtgttccagccacgttttagagctagaaatagcaagttaaaataaggctagtccgttatcaacttgaaaaagtggcaccgagtcggtgcttcattgccctggggaggtggctggaacacttggttttttt

SEQ ID NO: 4084 - RNA, 96 nt, synthetic construct
  source 1..96: mol_type = other RNA
cattgccctggggaggtggcgttttagagctagaaatagcaagttaaaataaggctagtccgttatcaacttgaaaaagtggcaccgagtcggtgc

SEQ ID NO: 4085 - RNA, 96 nt, synthetic construct
  source 1..96: mol_type = other RNA
tgttcattgccctggggcgggttttagagctagaaatagcaagttaaaataaggctagtccgttatcaacttgaaaaagtggcaccgagtcggtgc

SEQ ID NO: 4086 - RNA, 96 nt, synthetic construct
  source 1..96: mol_type = other RNA
cattgccctgggtcggtggcgttttagagctagaaatagcaagttaaaataaggctagtccgttatcaacttgaaaaagtggcaccgagtcggtgc

SEQ ID NO: 4087 - RNA, 96 nt, synthetic construct
  source 1..96: mol_type = other RNA
ttattctctggtcatcctgggttttagagctagaaatagcaagttaaaataaggctagtccgttatcaacttgaaaaagtggcaccgagtcggtgc

SEQ ID NO: 4088 - RNA, 96 nt, synthetic construct
  source 1..96: mol_type = other RNA
tgttcattgccctgggtagggttttagagctagaaatagcaagttaaaataaggctagtccgttatcaacttgaaaaagtggcaccgagtcggtgc

SEQ ID NO: 4089 - RNA, 96 nt, synthetic construct
  source 1..96: mol_type = other RNA
cattgccctgggcaggtggcgttttagagctagaaatagcaagttaaaataaggctagtccgttatcaacttgaaaaagtggcaccgagtcggtgc

SEQ ID NO: 4090 - RNA, 96 nt, synthetic construct
  source 1..96: mol_type = other RNA
tgttcattgccctgggtcgggttttagagctagaaatagcaagttaaaataaggctagtccgttatcaacttgaaaaagtggcaccgagtcggtgc

SEQ ID NO: 4091 - RNA, 96 nt, synthetic construct
  source 1..96: mol_type = other RNA
ctgtggctgagaaggcggaggttttagagctagaaatagcaagttaaaataaggctagtccgttatcaacttgaaaaagtggcaccgagtcggtgc

SEQ ID NO: 4092 - RNA, 96 nt, synthetic construct
  source 1..96: mol_type = other RNA
tgttcattgccctgggaagggttttagagctagaaatagcaagttaaaataaggctagtccgttatcaacttgaaaaagtggcaccgagtcggtgc

SEQ ID NO: 4093 - RNA, 96 nt, synthetic construct
  source 1..96: mol_type = other RNA
ggggaggtggctggaacactgttttagagctagaaatagcaagttaaaataaggctagtccgttatcaacttgaaaaagtggcaccgagtcggtgc

SEQ ID NO: 4094 - RNA, 96 nt, synthetic construct
  source 1..96: mol_type = other RNA
gggtaggtggctggaacactgttttagagctagaaatagcaagttaaaataaggctagtccgttatcaacttgaaaaagtggcaccgagtcggtgc

SEQ ID NO: 4095 - RNA, 96 nt, synthetic construct
  source 1..96: mol_type = other RNA
gggcaggtggctggaacactgttttagagctagaaatagcaagttaaaataaggctagtccgttatcaacttgaaaaagtggcaccgagtcggtgc

SEQ ID NO: 4096 - RNA, 96 nt, synthetic construct
  source 1..96: mol_type = other RNA
gggacggtggctggaacactgttttagagctagaaatagcaagttaaaataaggctagtccgttatcaacttgaaaaagtggcaccgagtcggtgc

SEQ ID NO: 4097 - RNA, 96 nt, synthetic construct
  source 1..96: mol_type = other RNA
ggggcggtggctggaacactgttttagagctagaaatagcaagttaaaataaggctagtccgttatcaacttgaaaaagtggcaccgagtcggtgc

SEQ ID NO: 4098 - RNA, 96 nt, synthetic construct
  source 1..96: mol_type = other RNA
gggtcggtggctggaacactgttttagagctagaaatagcaagttaaaataaggctagtccgttatcaacttgaaaaagtggcaccgagtcggtgc

SEQ ID NO: 4099 - RNA, 96 nt, synthetic construct
  source 1..96: mol_type = other RNA
tgttcattgccctgggacgggttttagagctagaaatagcaagttaaaataaggctagtccgttatcaacttgaaaaagtggcaccgagtcggtgc

SEQ ID NO: 4100 - RNA, 96 nt, synthetic construct
  source 1..96: mol_type = other RNA
tgtttattctctggtcatccgttttagagctagaaatagcaagttaaaataaggctagtccgttatcaacttgaaaaagtggcaccgagtcggtgc

SEQ ID NO: 4101 - RNA, 96 nt, synthetic construct
  source 1..96: mol_type = other RNA
cattgccctggggcggtggcgttttagagctagaaatagcaagttaaaataaggctagtccgttatcaacttgaaaaagtggcaccgagtcggtgc

SEQ ID NO: 4102 - RNA, 96 nt, synthetic construct
  source 1..96: mol_type = other RNA
tgttcattgccctgggcagggttttagagctagaaatagcaagttaaaataaggctagtccgttatcaacttgaaaaagtggcaccgagtcggtgc

SEQ ID NO: 4103 - RNA, 96 nt, synthetic construct
  source 1..96: mol_type = other RNA
gggaaggtggctggaacactgttttagagctagaaatagcaagttaaaataaggctagtccgttatcaacttgaaaaagtggcaccgagtcggtgc

SEQ ID NO: 4104 - RNA, 96 nt, synthetic construct
  source 1..96: mol_type = other RNA
tgttcattgccctggggagggttttagagctagaaatagcaagttaaaataaggctagtccgttatcaacttgaaaaagtggcaccgagtcggtgc

SEQ ID NO: 4105 - RNA, 96 nt, synthetic construct
  source 1..96: mol_type = other RNA
ggtggttgctgtggctgagagttttagagctagaaatagcaagttaaaataaggctagtccgttatcaacttgaaaaagtggcaccgagtcggtgc

SEQ ID NO: 4106 - RNA, 96 nt, synthetic construct
  source 1..96: mol_type = other RNA
ggttgctgtggctgagaagggttttagagctagaaatagcaagttaaaataaggctagtccgttatcaacttgaaaaagtggcaccgagtcggtgc

SEQ ID NO: 4107 - RNA, 96 nt, synthetic construct
  source 1..96: mol_type = other RNA
cattgccctgggtaggtggcgttttagagctagaaatagcaagttaaaataaggctagtccgttatcaacttgaaaaagtggcaccgagtcggtgc

SEQ ID NO: 4108 - RNA, 96 nt, synthetic construct
  source 1..96: mol_type = other RNA
cattgccctgggacggtggcgttttagagctagaaatagcaagttaaaataaggctagtccgttatcaacttgaaaaagtggcaccgagtcggtgc

SEQ ID NO: 4109 - RNA, 96 nt, synthetic construct
  source 1..96: mol_type = other RNA
cattgccctgggaaggtggcgttttagagctagaaatagcaagttaaaataaggctagtccgttatcaacttgaaaaagtggcaccgagtcggtgc

SEQ ID NO: 4110 - RNA, 96 nt, synthetic construct
  source 1..96: mol_type = other RNA
ggtcatcctggtggttgctggttttagagctagaaatagcaagttaaaataaggctagtccgttatcaacttgaaaaagtggcaccgagtcggtgc

SEQ ID NO: 4111 - RNA, 97 nt, synthetic construct
  source 1..97: mol_type = other RNA
gcattgccctgggtaggtggcgttttagagctagaaatagcaagttaaaataaggctagtccgttatcaacttgaaaaagtggcaccgagtcggtgc

SEQ ID NO: 4112 - RNA, 97 nt, synthetic construct
  source 1..97: mol_type = other RNA
gtgttcattgccctgggtagggttttagagctagaaatagcaagttaaaataaggctagtccgttatcaacttgaaaaagtggcaccgagtcggtgc

SEQ ID NO: 4113 - RNA, 97 nt, synthetic construct
  source 1..97: mol_type = other RNA
gtgttcattgccctggggcgggttttagagctagaaatagcaagttaaaataaggctagtccgttatcaacttgaaaaagtggcaccgagtcggtgc

SEQ ID NO: 4114 - RNA, 97 nt, synthetic construct
  source 1..97: mol_type = other RNA
gcattgccctgggaaggtggcgttttagagctagaaatagcaagttaaaataaggctagtccgttatcaacttgaaaaagtggcaccgagtcggtgc

SEQ ID NO: 4115 - RNA, 97 nt, synthetic construct
  source 1..97: mol_type = other RNA
gttattctctggtcatcctgggttttagagctagaaatagcaagttaaaataaggctagtccgttatcaacttgaaaaagtggcaccgagtcggtgc

SEQ ID NO: 4116 - RNA, 97 nt, synthetic construct
  source 1..97: mol_type = other RNA
gtgttcattgccctggggagggttttagagctagaaatagcaagttaaaataaggctagtccgttatcaacttgaaaaagtggcaccgagtcggtgc

SEQ ID NO: 4117 - RNA, 97 nt, synthetic construct
  source 1..97: mol_type = other RNA
gcattgccctgggacggtggcgttttagagctagaaatagcaagttaaaataaggctagtccgttatcaacttgaaaaagtggcaccgagtcggtgc

SEQ ID NO: 4118 - RNA, 97 nt, synthetic construct
  source 1..97: mol_type = other RNA
gtgttcattgccctgggacgggttttagagctagaaatagcaagttaaaataaggctagtccgttatcaacttgaaaaagtggcaccgagtcggtgc

SEQ ID NO: 4119 - RNA, 97 nt, synthetic construct
  source 1..97: mol_type = other RNA
gcattgccctgggcaggtggcgttttagagctagaaatagcaagttaaaataaggctagtccgttatcaacttgaaaaagtggcaccgagtcggtgc

SEQ ID NO: 4120 - RNA, 97 nt, synthetic construct
  source 1..97: mol_type = other RNA
gtgttcattgccctgggtcgggttttagagctagaaatagcaagttaaaataaggctagtccgttatcaacttgaaaaagtggcaccgagtcggtgc

SEQ ID NO: 4121 - RNA, 97 nt, synthetic construct
  source 1..97: mol_type = other RNA
gcattgccctggggaggtggcgttttagagctagaaatagcaagttaaaataaggctagtccgttatcaacttgaaaaagtggcaccgagtcggtgc

SEQ ID NO: 4122 - RNA, 97 nt, synthetic construct
  source 1..97: mol_type = other RNA
gcattgccctggggcggtggcgttttagagctagaaatagcaagttaaaataaggctagtccgttatcaacttgaaaaagtggcaccgagtcggtgc

SEQ ID NO: 4123 - RNA, 97 nt, synthetic construct
  source 1..97: mol_type = other RNA
gcattgccctgggtcggtggcgttttagagctagaaatagcaagttaaaataaggctagtccgttatcaacttgaaaaagtggcaccgagtcggtgc

SEQ ID NO: 4124 - RNA, 97 nt, synthetic construct
  source 1..97: mol_type = other RNA
gctgtggctgagaaggcggaggttttagagctagaaatagcaagttaaaataaggctagtccgttatcaacttgaaaaagtggcaccgagtcggtgc

SEQ ID NO: 4125 - RNA, 97 nt, synthetic construct
  source 1..97: mol_type = other RNA
gtgtttattctctggtcatccgttttagagctagaaatagcaagttaaaataaggctagtccgttatcaacttgaaaaagtggcaccgagtcggtgc

SEQ ID NO: 4126 - RNA, 97 nt, synthetic construct
  source 1..97: mol_type = other RNA
gtgttcattgccctgggaagggttttagagctagaaatagcaagttaaaataaggctagtccgttatcaacttgaaaaagtggcaccgagtcggtgc

SEQ ID NO: 4127 - RNA, 97 nt, synthetic construct
  source 1..97: mol_type = other RNA
gtgttcattgccctgggcagggttttagagctagaaatagcaagttaaaataaggctagtccgttatcaacttgaaaaagtggcaccgagtcggtgc

SEQ ID NO: 4128 - RNA, 16 nt, synthetic construct
  source 1..16: mol_type = other RNA
tggtggttgctgtggc

SEQ ID NO: 4129 - RNA, 17 nt, synthetic construct
  source 1..17: mol_type = other RNA
ctggtggttgctgtggc

SEQ ID NO: 4130 - RNA, 18 nt, synthetic construct
  source 1..18: mol_type = other RNA
cctggtggttgctgtggc

SEQ ID NO: 4131 - RNA, 19 nt, synthetic construct
  source 1..19: mol_type = other RNA
tcctggtggttgctgtggc

SEQ ID NO: 4132 - RNA, 20 nt, synthetic construct
  source 1..20: mol_type = other RNA
atcctggtggttgctgtggc

SEQ ID NO: 4133 - RNA, 21 nt, synthetic construct
  source 1..21: mol_type = other RNA
catcctggtggttgctgtggc

SEQ ID NO: 4134 - RNA, 22 nt, synthetic construct
  source 1..22: mol_type = other RNA
tcatcctggtggttgctgtggc

SEQ ID NO: 4135-4141 - skipped (7 entries)

SEQ ID NO: 4142 - RNA, 10 nt, synthetic construct
  source 1..10: mol_type = other RNA
acagcaacca

SEQ ID NO: 4143 - RNA, 11 nt, synthetic construct
  source 1..11: mol_type = other RNA
acagcaaccac

SEQ ID NO: 4144 - RNA, 12 nt, synthetic construct
  source 1..12: mol_type = other RNA
acagcaaccacc

SEQ ID NO: 4145 - RNA, 13 nt, synthetic construct
  source 1..13: mol_type = other RNA
acagcaaccacca

SEQ ID NO: 4146 - RNA, 14 nt, synthetic construct
  source 1..14: mol_type = other RNA
acagcaaccaccag

SEQ ID NO: 4147 - RNA, 15 nt, synthetic construct
  source 1..15: mol_type = other RNA
acagcaaccaccagg

SEQ ID NO: 4148 - RNA, 16 nt, synthetic construct
  source 1..16: mol_type = other RNA
acagcaaccaccagga

SEQ ID NO: 4149 - RNA, 17 nt, synthetic construct
  source 1..17: mol_type = other RNA
acagcaaccaccaggat

SEQ ID NO: 4150 - RNA, 18 nt, synthetic construct
  source 1..18: mol_type = other RNA
acagcaaccaccaggatg

SEQ ID NO: 4151 - RNA, 19 nt, synthetic construct
  source 1..19: mol_type = other RNA
acagcaaccaccaggatga

SEQ ID NO: 4152 - RNA, 78 nt, synthetic construct
  source 1..78: mol_type = other RNA
cggcccagggcaatgaacacaaagagcatggggggcgtgtcgaagaatgtcacagggctcctctccgccttctcagcc

SEQ ID NO: 4153 - RNA, 79 nt, synthetic construct
  source 1..79: mol_type = other RNA
ccggcccagggcaatgaacacaaagagcatggggggcgtgtcgaagaatgtcacagggctcctctccgccttctcagcc

SEQ ID NO: 4154 - RNA, 80 nt, synthetic construct
  source 1..80: mol_type = other RNA
accggcccagggcaatgaacacaaagagcatggggggcgtgtcgaagaatgtcacagggctcctctccgccttctcagcc

SEQ ID NO: 4155 - RNA, 81 nt, synthetic construct
  source 1..81: mol_type = other RNA
caccggcccagggcaatgaacacaaagagcatggggggcgtgtcgaagaatgtcacagggctcctctccgccttctcagcc

SEQ ID NO: 4156 - RNA, 82 nt, synthetic construct
  source 1..82: mol_type = other RNA
ccaccggcccagggcaatgaacacaaagagcatggggggcgtgtcgaagaatgtcacagggctcctctccgccttctcagcc

SEQ ID NO: 4157 - RNA, 83 nt, synthetic construct
  source 1..83: mol_type = other RNA
gccaccggcccagggcaatgaacacaaagagcatggggggcgtgtcgaagaatgtcacagggctcctctccgccttctcagcc

SEQ ID NO: 4158 - RNA, 84 nt, synthetic construct
  source 1..84: mol_type = other RNA
agccaccggcccagggcaatgaacacaaagagcatggggggcgtgtcgaagaatgtcacagggctcctctccgccttctcagcc

SEQ ID NO: 4159 - RNA, 85 nt, synthetic construct
  source 1..85: mol_type = other RNA
cagccaccggcccagggcaatgaacacaaagagcatggggggcgtgtcgaagaatgtcacagggctcctctccgccttctcagcc

SEQ ID NO: 4160 - RNA, 86 nt, synthetic construct
  source 1..86: mol_type = other RNA
ccagccaccggcccagggcaatgaacacaaagagcatggggggcgtgtcgaagaatgtcacagggctcctctccgccttctcagcc

SEQ ID NO: 4161 - RNA, 87 nt, synthetic construct
  source 1..87: mol_type = other RNA
tccagccaccggcccagggcaatgaacacaaagagcatggggggcgtgtcgaagaatgtcacagggctcctctccgccttctcagcc

SEQ ID NO: 4162 - RNA, 88 nt, synthetic construct
  source 1..88: mol_type = other RNA
ttccagccaccggcccagggcaatgaacacaaagagcatggggggcgtgtcgaagaatgtcacagggctcctctccgccttctcagcc

SEQ ID NO: 4163 - RNA, 89 nt, synthetic construct
  source 1..89: mol_type = other RNA
gttccagccaccggcccagggcaatgaacacaaagagcatggggggcgtgtcgaagaatgtcacagggctcctctccgccttctcagcc

SEQ ID NO: 4164 - RNA, 90 nt, synthetic construct
  source 1..90: mol_type = other RNA
tgttccagccaccggcccagggcaatgaacacaaagagcatggggggcgtgtcgaagaatgtcacagggctcctctccgccttctcagcc

SEQ ID NO: 4165 - RNA, 91 nt, synthetic construct
  source 1..91: mol_type = other RNA
gtgttccagccaccggcccagggcaatgaacacaaagagcatggggggcgtgtcgaagaatgtcacagggctcctctccgccttctcagcc

SEQ ID NO: 4166 - RNA, 92 nt, synthetic construct
  source 1..92: mol_type = other RNA
agtgttccagccaccggcccagggcaatgaacacaaagagcatggggggcgtgtcgaagaatgtcacagggctcctctccgccttctcagcc

SEQ ID NO: 4167 - RNA, 93 nt, synthetic construct
  source 1..93: mol_type = other RNA
aagtgttccagccaccggcccagggcaatgaacacaaagagcatggggggcgtgtcgaagaatgtcacagggctcctctccgccttctcagcc

SEQ ID NO: 4168 - RNA, 94 nt, synthetic construct
  source 1..94: mol_type = other RNA
caagtgttccagccaccggcccagggcaatgaacacaaagagcatggggggcgtgtcgaagaatgtcacagggctcctctccgccttctcagcc

SEQ ID NO: 4169 - RNA, 95 nt, synthetic construct
  source 1..95: mol_type = other RNA
ccaagtgttccagccaccggcccagggcaatgaacacaaagagcatggggggcgtgtcgaagaatgtcacagggctcctctccgccttctcagcc

SEQ ID NO: 4170 - RNA, 96 nt, synthetic construct
  source 1..96: mol_type = other RNA
gccaagtgttccagccaccggcccagggcaatgaacacaaagagcatggggggcgtgtcgaagaatgtcacagggctcctctccgccttctcagcc

SEQ ID NO: 4171 - RNA, 97 nt, synthetic construct
  source 1..97: mol_type = other RNA
tgccaagtgttccagccaccggcccagggcaatgaacacaaagagcatggggggcgtgtcgaagaatgtcacagggctcctctccgccttctcagcc

SEQ ID NO: 4172 - RNA, 98 nt, synthetic construct
  source 1..98: mol_type = other RNA
ttgccaagtgttccagccaccggcccagggcaatgaacacaaagagcatggggggcgtgtcgaagaatgtcacagggctcctctccgccttctcagcc

SEQ ID NO: 4173 - RNA, 99 nt, synthetic construct
  source 1..99: mol_type = other RNA
tttgccaagtgttccagccaccggcccagggcaatgaacacaaagagcatggggggcgtgtcgaagaatgtcacagggctcctctccgccttctcagcc

SEQ ID NO: 4174 - RNA, 100 nt, synthetic construct
  source 1..100: mol_type = other RNA
ctttgccaagtgttccagccaccggcccagggcaatgaacacaaagagcatggggggcgtgtcgaagaatgtcacagggctcctctccgccttctcagcc

SEQ ID NO: 4175 - RNA, 20 nt, synthetic construct
  source 1..20: mol_type = other RNA
cagcaaccaccaggatgacc

SEQ ID NO: 4176 - RNA, 16 nt, synthetic construct
  source 1..16: mol_type = other RNA
gtggttgctgtggctg

SEQ ID NO: 4177 - RNA, 17 nt, synthetic construct
  source 1..17: mol_type = other RNA
ggtggttgctgtggctg

SEQ ID NO: 4178 - RNA, 18 nt, synthetic construct
  source 1..18: mol_type = other RNA
tggtggttgctgtggctg

SEQ ID NO: 4179 - RNA, 19 nt, synthetic construct
  source 1..19: mol_type = other RNA
ctggtggttgctgtggctg

SEQ ID NO: 4180 - RNA, 20 nt, synthetic construct
  source 1..20: mol_type = other RNA
cctggtggttgctgtggctg

SEQ ID NO: 4181 - RNA, 21 nt, synthetic construct
  source 1..21: mol_type = other RNA
tcctggtggttgctgtggctg

SEQ ID NO: 4182 - RNA, 22 nt, synthetic construct
  source 1..22: mol_type = other RNA
atcctggtggttgctgtggctg

SEQ ID NO: 4183-4189 - skipped (7 entries)

SEQ ID NO: 4190 - RNA, 10 nt, synthetic construct
  source 1..10: mol_type = other RNA
ccacagcaac

SEQ ID NO: 4191 - RNA, 11 nt, synthetic construct
  source 1..11: mol_type = other RNA
ccacagcaacc

SEQ ID NO: 4192 - RNA, 12 nt, synthetic construct
  source 1..12: mol_type = other RNA
ccacagcaacca

SEQ ID NO: 4193 - RNA, 13 nt, synthetic construct
  source 1..13: mol_type = other RNA
ccacagcaaccac

SEQ ID NO: 4194 - RNA, 14 nt, synthetic construct
  source 1..14: mol_type = other RNA
ccacagcaaccacc

SEQ ID NO: 4195 - RNA, 15 nt, synthetic construct
  source 1..15: mol_type = other RNA
ccacagcaaccacca

SEQ ID NO: 4196 - RNA, 16 nt, synthetic construct
  source 1..16: mol_type = other RNA
ccacagcaaccaccag

SEQ ID NO: 4197 - RNA, 17 nt, synthetic construct
  source 1..17: mol_type = other RNA
ccacagcaaccaccagg

SEQ ID NO: 4198 - RNA, 18 nt, synthetic construct
  source 1..18: mol_type = other RNA
ccacagcaaccaccagga

SEQ ID NO: 4199 - RNA, 19 nt, synthetic construct
  source 1..19: mol_type = other RNA
ccacagcaaccaccaggat

SEQ ID NO: 4200 - RNA, 76 nt, synthetic construct
  source 1..76: mol_type = other RNA
cggcccagggcaatgaacacaaagagcatggggggcgtgtcgaagaatgtcacagggctcctctccgccttctcag

SEQ ID NO: 4201 - RNA, 76 nt, synthetic construct
  source 1..76: mol_type = other RNA
cggcccagggcaatgaacacaaagagcatggggggcgtgtcgaagaatgtcacagggctcctctccgccttttcag

SEQ ID NO: 4202 - RNA, 77 nt, synthetic construct
  source 1..77: mol_type = other RNA
ccggcccagggcaatgaacacaaagagcatggggggcgtgtcgaagaatgtcacagggctcctctccgccttttcag

SEQ ID NO: 4203 - RNA, 77 nt, synthetic construct
  source 1..77: mol_type = other RNA
ccggcccagggcaatgaacacaaagagcatggggggcgtgtcgaagaatgtcacagggctcctctccgccttctcag

SEQ ID NO: 4204 - RNA, 78 nt, synthetic construct
  source 1..78: mol_type = other RNA
accggcccagggcaatgaacacaaagagcatggggggcgtgtcgaagaatgtcacagggctcctctccgccttctcag

SEQ ID NO: 4205 - RNA, 78 nt, synthetic construct
  source 1..78: mol_type = other RNA
accggcccagggcaatgaacacaaagagcatggggggcgtgtcgaagaatgtcacagggctcctctccgccttttcag

SEQ ID NO: 4206 - RNA, 79 nt, synthetic construct
  source 1..79: mol_type = other RNA
caccggcccagggcaatgaacacaaagagcatggggggcgtgtcgaagaatgtcacagggctcctctccgccttttcag

SEQ ID NO: 4207 - RNA, 79 nt, synthetic construct
  source 1..79: mol_type = other RNA
caccggcccagggcaatgaacacaaagagcatggggggcgtgtcgaagaatgtcacagggctcctctccgccttctcag

SEQ ID NO: 4208 - RNA, 80 nt, synthetic construct
  source 1..80: mol_type = other RNA
ccaccggcccagggcaatgaacacaaagagcatggggggcgtgtcgaagaatgtcacagggctcctctccgccttttcag

SEQ ID NO: 4209 - RNA, 80 nt, synthetic construct
  source 1..80: mol_type = other RNA
ccaccggcccagggcaatgaacacaaagagcatggggggcgtgtcgaagaatgtcacagggctcctctccgccttctcag

SEQ ID NO: 4210 - RNA, 81 nt, synthetic construct
  source 1..81: mol_type = other RNA
gccaccggcccagggcaatgaacacaaagagcatggggggcgtgtcgaagaatgtcacagggctcctctccgccttctcag

SEQ ID NO: 4211 - RNA, 81 nt, synthetic construct
  source 1..81: mol_type = other RNA
gccaccggcccagggcaatgaacacaaagagcatggggggcgtgtcgaagaatgtcacagggctcctctccgccttttcag

SEQ ID NO: 4212 - RNA, 82 nt, synthetic construct
  source 1..82: mol_type = other RNA
agccaccggcccagggcaatgaacacaaagagcatggggggcgtgtcgaagaatgtcacagggctcctctccgccttttcag

SEQ ID NO: 4213 - RNA, 82 nt, synthetic construct
  source 1..82: mol_type = other RNA
agccaccggcccagggcaatgaacacaaagagcatggggggcgtgtcgaagaatgtcacagggctcctctccgccttctcag

SEQ ID NO: 4214 - RNA, 83 nt, synthetic construct
  source 1..83: mol_type = other RNA
cagccaccggcccagggcaatgaacacaaagagcatggggggcgtgtcgaagaatgtcacagggctcctctccgccttttcag

SEQ ID NO: 4215 - RNA, 83 nt, synthetic construct
  source 1..83: mol_type = other RNA
cagccaccggcccagggcaatgaacacaaagagcatggggggcgtgtcgaagaatgtcacagggctcctctccgccttctcag

SEQ ID NO: 4216 - RNA, 84 nt, synthetic construct
  source 1..84: mol_type = other RNA
ccagccaccggcccagggcaatgaacacaaagagcatggggggcgtgtcgaagaatgtcacagggctcctctccgccttctcag

SEQ ID NO: 4217 - RNA, 84 nt, synthetic construct
  source 1..84: mol_type = other RNA
ccagccaccggcccagggcaatgaacacaaagagcatggggggcgtgtcgaagaatgtcacagggctcctctccgccttttcag

SEQ ID NO: 4218 - RNA, 85 nt, synthetic construct
  source 1..85: mol_type = other RNA
tccagccaccggcccagggcaatgaacacaaagagcatggggggcgtgtcgaagaatgtcacagggctcctctccgccttctcag

SEQ ID NO: 4219 - RNA, 85 nt, synthetic construct
  source 1..85: mol_type = other RNA
tccagccaccggcccagggcaatgaacacaaagagcatggggggcgtgtcgaagaatgtcacagggctcctctccgccttttcag

SEQ ID NO: 4220 - RNA, 86 nt, synthetic construct
  source 1..86: mol_type = other RNA
ttccagccaccggcccagggcaatgaacacaaagagcatggggggcgtgtcgaagaatgtcacagggctcctctccgccttttcag

SEQ ID NO: 4221 - RNA, 86 nt, synthetic construct
  source 1..86: mol_type = other RNA
ttccagccaccggcccagggcaatgaacacaaagagcatggggggcgtgtcgaagaatgtcacagggctcctctccgccttctcag

SEQ ID NO: 4222 - RNA, 87 nt, synthetic construct
  source 1..87: mol_type = other RNA
gttccagccaccggcccagggcaatgaacacaaagagcatggggggcgtgtcgaagaatgtcacagggctcctctccgccttttcag

SEQ ID NO: 4223 - RNA, 87 nt, synthetic construct
  source 1..87: mol_type = other RNA
gttccagccaccggcccagggcaatgaacacaaagagcatggggggcgtgtcgaagaatgtcacagggctcctctccgccttctcag

SEQ ID NO: 4224 - RNA, 88 nt, synthetic construct
  source 1..88: mol_type = other RNA
tgttccagccaccggcccagggcaatgaacacaaagagcatggggggcgtgtcgaagaatgtcacagggctcctctccgccttttcag

SEQ ID NO: 4225 - RNA, 88 nt, synthetic construct
  source 1..88: mol_type = other RNA
tgttccagccaccggcccagggcaatgaacacaaagagcatggggggcgtgtcgaagaatgtcacagggctcctctccgccttctcag

SEQ ID NO: 4226 - RNA, 89 nt, synthetic construct
  source 1..89: mol_type = other RNA
gtgttccagccaccggcccagggcaatgaacacaaagagcatggggggcgtgtcgaagaatgtcacagggctcctctccgccttctcag

SEQ ID NO: 4227 - RNA, 89 nt, synthetic construct
  source 1..89: mol_type = other RNA
gtgttccagccaccggcccagggcaatgaacacaaagagcatggggggcgtgtcgaagaatgtcacagggctcctctccgccttttcag

SEQ ID NO: 4228 - RNA, 90 nt, synthetic construct
  source 1..90: mol_type = other RNA
agtgttccagccaccggcccagggcaatgaacacaaagagcatggggggcgtgtcgaagaatgtcacagggctcctctccgccttctcag

SEQ ID NO: 4229 - RNA, 90 nt, synthetic construct
  source 1..90: mol_type = other RNA
agtgttccagccaccggcccagggcaatgaacacaaagagcatggggggcgtgtcgaagaatgtcacagggctcctctccgccttttcag

SEQ ID NO: 4230 - RNA, 91 nt, synthetic construct
  source 1..91: mol_type = other RNA
aagtgttccagccaccggcccagggcaatgaacacaaagagcatggggggcgtgtcgaagaatgtcacagggctcctctccgccttttcag

SEQ ID NO: 4231 - RNA, 91 nt, synthetic construct
  source 1..91: mol_type = other RNA
aagtgttccagccaccggcccagggcaatgaacacaaagagcatggggggcgtgtcgaagaatgtcacagggctcctctccgccttctcag

SEQ ID NO: 4232 - RNA, 92 nt, synthetic construct
  source 1..92: mol_type = other RNA
caagtgttccagccaccggcccagggcaatgaacacaaagagcatggggggcgtgtcgaagaatgtcacagggctcctctccgccttctcag

SEQ ID NO: 4233 - RNA, 92 nt, synthetic construct
  source 1..92: mol_type = other RNA
caagtgttccagccaccggcccagggcaatgaacacaaagagcatggggggcgtgtcgaagaatgtcacagggctcctctccgccttttcag

SEQ ID NO: 4234 - RNA, 93 nt, synthetic construct
  source 1..93: mol_type = other RNA
ccaagtgttccagccaccggcccagggcaatgaacacaaagagcatggggggcgtgtcgaagaatgtcacagggctcctctccgccttttcag

SEQ ID NO: 4235 - RNA, 93 nt, synthetic construct
  source 1..93: mol_type = other RNA
ccaagtgttccagccaccggcccagggcaatgaacacaaagagcatggggggcgtgtcgaagaatgtcacagggctcctctccgccttctcag

SEQ ID NO: 4236 - RNA, 94 nt, synthetic construct
  source 1..94: mol_type = other RNA
gccaagtgttccagccaccggcccagggcaatgaacacaaagagcatggggggcgtgtcgaagaatgtcacagggctcctctccgccttctcag

SEQ ID NO: 4237 - RNA, 94 nt, synthetic construct
  source 1..94: mol_type = other RNA
gccaagtgttccagccaccggcccagggcaatgaacacaaagagcatggggggcgtgtcgaagaatgtcacagggctcctctccgccttttcag

SEQ ID NO: 4238 - RNA, 95 nt, synthetic construct
  source 1..95: mol_type = other RNA
tgccaagtgttccagccaccggcccagggcaatgaacacaaagagcatggggggcgtgtcgaagaatgtcacagggctcctctccgccttttcag

SEQ ID NO: 4239 - RNA, 95 nt, synthetic construct
  source 1..95: mol_type = other RNA
tgccaagtgttccagccaccggcccagggcaatgaacacaaagagcatggggggcgtgtcgaagaatgtcacagggctcctctccgccttctcag

SEQ ID NO: 4240 - RNA, 96 nt, synthetic construct
  source 1..96: mol_type = other RNA
ttgccaagtgttccagccaccggcccagggcaatgaacacaaagagcatggggggcgtgtcgaagaatgtcacagggctcctctccgccttttcag

SEQ ID NO: 4241 - RNA, 96 nt, synthetic construct
  source 1..96: mol_type = other RNA
ttgccaagtgttccagccaccggcccagggcaatgaacacaaagagcatggggggcgtgtcgaagaatgtcacagggctcctctccgccttctcag

SEQ ID NO: 4242 - RNA, 97 nt, synthetic construct
  source 1..97: mol_type = other RNA
tttgccaagtgttccagccaccggcccagggcaatgaacacaaagagcatggggggcgtgtcgaagaatgtcacagggctcctctccgccttttcag

SEQ ID NO: 4243 - RNA, 97 nt, synthetic construct
  source 1..97: mol_type = other RNA
tttgccaagtgttccagccaccggcccagggcaatgaacacaaagagcatggggggcgtgtcgaagaatgtcacagggctcctctccgccttctcag

SEQ ID NO: 4244 - RNA, 98 nt, synthetic construct
  source 1..98: mol_type = other RNA
ctttgccaagtgttccagccaccggcccagggcaatgaacacaaagagcatggggggcgtgtcgaagaatgtcacagggctcctctccgccttctcag

SEQ ID NO: 4245 - RNA, 98 nt, synthetic construct
  source 1..98: mol_type = other RNA
ctttgccaagtgttccagccaccggcccagggcaatgaacacaaagagcatggggggcgtgtcgaagaatgtcacagggctcctctccgccttttcag

SEQ ID NO: 4246 - RNA, 99 nt, synthetic construct
  source 1..99: mol_type = other RNA
cctttgccaagtgttccagccaccggcccagggcaatgaacacaaagagcatggggggcgtgtcgaagaatgtcacagggctcctctccgccttttcag

SEQ ID NO: 4247 - RNA, 99 nt, synthetic construct
  source 1..99: mol_type = other RNA
cctttgccaagtgttccagccaccggcccagggcaatgaacacaaagagcatggggggcgtgtcgaagaatgtcacagggctcctctccgccttctcag

SEQ ID NO: 4248 - RNA, 100 nt, synthetic construct
  source 1..100: mol_type = other RNA
acctttgccaagtgttccagccaccggcccagggcaatgaacacaaagagcatggggggcgtgtcgaagaatgtcacagggctcctctccgccttctcag

SEQ ID NO: 4249 - RNA, 100 nt, synthetic construct
  source 1..100: mol_type = other RNA
acctttgccaagtgttccagccaccggcccagggcaatgaacacaaagagcatggggggcgtgtcgaagaatgtcacagggctcctctccgccttttcag

SEQ ID NO: 4250 - RNA, 20 nt, synthetic construct
  source 1..20: mol_type = other RNA
gggctcctctccgccttttc

SEQ ID NO: 4251 - RNA, 16 nt, synthetic construct
  source 1..16: mol_type = other RNA
ctgtggctgagaaggc

SEQ ID NO: 4252 - RNA, 17 nt, synthetic construct
  source 1..17: mol_type = other RNA
gctgtggctgagaaggc

SEQ ID NO: 4253 - RNA, 18 nt, synthetic construct
  source 1..18: mol_type = other RNA
tgctgtggctgagaaggc

SEQ ID NO: 4254 - RNA, 19 nt, synthetic construct
  source 1..19: mol_type = other RNA
ttgctgtggctgagaaggc

SEQ ID NO: 4255 - RNA, 20 nt, synthetic construct
  source 1..20: mol_type = other RNA
gttgctgtggctgagaaggc

SEQ ID NO: 4256 - RNA, 21 nt, synthetic construct
  source 1..21: mol_type = other RNA
ggttgctgtggctgagaaggc

SEQ ID NO: 4257 - RNA, 22 nt, synthetic construct
  source 1..22: mol_type = other RNA
tggttgctgtggctgagaaggc

SEQ ID NO: 4258-4264 - skipped (7 entries)

SEQ ID NO: 4265 - RNA, 10 nt, synthetic construct
  source 1..10: mol_type = other RNA
ttctcagcca

SEQ ID NO: 4266 - RNA, 11 nt, synthetic construct
  source 1..11: mol_type = other RNA
ttctcagccac

SEQ ID NO: 4267 - RNA, 12 nt, synthetic construct
  source 1..12: mol_type = other RNA
ttctcagccaca

SEQ ID NO: 4268 - RNA, 13 nt, synthetic construct
  source 1..13: mol_type = other RNA
ttctcagccacag

SEQ ID NO: 4269 - RNA, 14 nt, synthetic construct
  source 1..14: mol_type = other RNA
ttctcagccacagc

SEQ ID NO: 4270 - RNA, 15 nt, synthetic construct
  source 1..15: mol_type = other RNA
ttctcagccacagca

SEQ ID NO: 4271 - RNA, 16 nt, synthetic construct
  source 1..16: mol_type = other RNA
ttctcagccacagcaa

SEQ ID NO: 4272 - RNA, 17 nt, synthetic construct
  source 1..17: mol_type = other RNA
ttctcagccacagcaac

SEQ ID NO: 4273 - RNA, 18 nt, synthetic construct
  source 1..18: mol_type = other RNA
ttctcagccacagcaacc

SEQ ID NO: 4274 - RNA, 19 nt, synthetic construct
  source 1..19: mol_type = other RNA
ttctcagccacagcaacca

SEQ ID NO: 4275 - RNA, 69 nt, synthetic construct
  source 1..69: mol_type = other RNA
cggcccagggcaatgaacacaaagagcatggggggcgtgtcgaagaatgtcacagggctcctctccgcc

SEQ ID NO: 4276 - RNA, 70 nt, synthetic construct
  source 1..70: mol_type = other RNA
ccggcccagggcaatgaacacaaagagcatggggggcgtgtcgaagaatgtcacagggctcctctccgcc

SEQ ID NO: 4277 - RNA, 71 nt, synthetic construct
  source 1..71: mol_type = other RNA
accggcccagggcaatgaacacaaagagcatggggggcgtgtcgaagaatgtcacagggctcctctccgcc

SEQ ID NO: 4278 - RNA, 72 nt, synthetic construct
  source 1..72: mol_type = other RNA
caccggcccagggcaatgaacacaaagagcatggggggcgtgtcgaagaatgtcacagggctcctctccgcc

SEQ ID NO: 4279 - RNA, 73 nt, synthetic construct
  source 1..73: mol_type = other RNA
ccaccggcccagggcaatgaacacaaagagcatggggggcgtgtcgaagaatgtcacagggctcctctccgcc

SEQ ID NO: 4280 - RNA, 74 nt, synthetic construct
  source 1..74: mol_type = other RNA
gccaccggcccagggcaatgaacacaaagagcatggggggcgtgtcgaagaatgtcacagggctcctctccgcc

SEQ ID NO: 4281 - RNA, 75 nt, synthetic construct
  source 1..75: mol_type = other RNA
agccaccggcccagggcaatgaacacaaagagcatggggggcgtgtcgaagaatgtcacagggctcctctccgcc

SEQ ID NO: 4282 - RNA, 76 nt, synthetic construct
  source 1..76: mol_type = other RNA
cagccaccggcccagggcaatgaacacaaagagcatggggggcgtgtcgaagaatgtcacagggctcctctccgcc

SEQ ID NO: 4283 - RNA, 77 nt, synthetic construct
  source 1..77: mol_type = other RNA
ccagccaccggcccagggcaatgaacacaaagagcatggggggcgtgtcgaagaatgtcacagggctcctctccgcc

SEQ ID NO: 4284 - RNA, 78 nt, synthetic construct
  source 1..78: mol_type = other RNA
tccagccaccggcccagggcaatgaacacaaagagcatggggggcgtgtcgaagaatgtcacagggctcctctccgcc

SEQ ID NO: 4285 - RNA, 79 nt, synthetic construct
  source 1..79: mol_type = other RNA
ttccagccaccggcccagggcaatgaacacaaagagcatggggggcgtgtcgaagaatgtcacagggctcctctccgcc

SEQ ID NO: 4286 - RNA, 80 nt, synthetic construct
  source 1..80: mol_type = other RNA
gttccagccaccggcccagggcaatgaacacaaagagcatggggggcgtgtcgaagaatgtcacagggctcctctccgcc

SEQ ID NO: 4287 - RNA, 81 nt, synthetic construct
  source 1..81: mol_type = other RNA
tgttccagccaccggcccagggcaatgaacacaaagagcatggggggcgtgtcgaagaatgtcacagggctcctctccgcc

SEQ ID NO: 4288 - RNA, 82 nt, synthetic construct
  source 1..82: mol_type = other RNA
gtgttccagccaccggcccagggcaatgaacacaaagagcatggggggcgtgtcgaagaatgtcacagggctcctctccgcc

SEQ ID NO: 4289 - RNA, 83 nt, synthetic construct
  source 1..83: mol_type = other RNA
agtgttccagccaccggcccagggcaatgaacacaaagagcatggggggcgtgtcgaagaatgtcacagggctcctctccgcc

SEQ ID NO: 4290 - RNA, 84 nt, synthetic construct
  source 1..84: mol_type = other RNA
aagtgttccagccaccggcccagggcaatgaacacaaagagcatggggggcgtgtcgaagaatgtcacagggctcctctccgcc

SEQ ID NO: 4291 - RNA, 85 nt, synthetic construct
  source 1..85: mol_type = other RNA
caagtgttccagccaccggcccagggcaatgaacacaaagagcatggggggcgtgtcgaagaatgtcacagggctcctctccgcc

SEQ ID NO: 4292 - RNA, 86 nt, synthetic construct
  source 1..86: mol_type = other RNA
ccaagtgttccagccaccggcccagggcaatgaacacaaagagcatggggggcgtgtcgaagaatgtcacagggctcctctccgcc

SEQ ID NO: 4293 - RNA, 87 nt, synthetic construct
  source 1..87: mol_type = other RNA
gccaagtgttccagccaccggcccagggcaatgaacacaaagagcatggggggcgtgtcgaagaatgtcacagggctcctctccgcc

SEQ ID NO: 4294 - RNA, 88 nt, synthetic construct
  source 1..88: mol_type = other RNA
tgccaagtgttccagccaccggcccagggcaatgaacacaaagagcatggggggcgtgtcgaagaatgtcacagggctcctctccgcc

SEQ ID NO: 4295 - RNA, 89 nt, synthetic construct
  source 1..89: mol_type = other RNA
ttgccaagtgttccagccaccggcccagggcaatgaacacaaagagcatggggggcgtgtcgaagaatgtcacagggctcctctccgcc

SEQ ID NO: 4296 - RNA, 90 nt, synthetic construct
  source 1..90: mol_type = other RNA
tttgccaagtgttccagccaccggcccagggcaatgaacacaaagagcatggggggcgtgtcgaagaatgtcacagggctcctctccgcc

SEQ ID NO: 4297 - RNA, 91 nt, synthetic construct
  source 1..91: mol_type = other RNA
ctttgccaagtgttccagccaccggcccagggcaatgaacacaaagagcatggggggcgtgtcgaagaatgtcacagggctcctctccgcc

SEQ ID NO: 4298 - RNA, 92 nt, synthetic construct
  source 1..92: mol_type = other RNA
cctttgccaagtgttccagccaccggcccagggcaatgaacacaaagagcatggggggcgtgtcgaagaatgtcacagggctcctctccgcc

SEQ ID NO: 4299 - RNA, 93 nt, synthetic construct
  source 1..93: mol_type = other RNA
acctttgccaagtgttccagccaccggcccagggcaatgaacacaaagagcatggggggcgtgtcgaagaatgtcacagggctcctctccgcc

SEQ ID NO: 4300 - RNA, 94 nt, synthetic construct
  source 1..94: mol_type = other RNA
tacctttgccaagtgttccagccaccggcccagggcaatgaacacaaagagcatggggggcgtgtcgaagaatgtcacagggctcctctccgcc

SEQ ID NO: 4301 - RNA, 95 nt, synthetic construct
  source 1..95: mol_type = other RNA
ttacctttgccaagtgttccagccaccggcccagggcaatgaacacaaagagcatggggggcgtgtcgaagaatgtcacagggctcctctccgcc

SEQ ID NO: 4302 - RNA, 96 nt, synthetic construct
  source 1..96: mol_type = other RNA
gttacctttgccaagtgttccagccaccggcccagggcaatgaacacaaagagcatggggggcgtgtcgaagaatgtcacagggctcctctccgcc

SEQ ID NO: 4303 - RNA, 97 nt, synthetic construct
  source 1..97: mol_type = other RNA
tgttacctttgccaagtgttccagccaccggcccagggcaatgaacacaaagagcatggggggcgtgtcgaagaatgtcacagggctcctctccgcc

SEQ ID NO: 4304 - RNA, 98 nt, synthetic construct
  source 1..98: mol_type = other RNA
ctgttacctttgccaagtgttccagccaccggcccagggcaatgaacacaaagagcatggggggcgtgtcgaagaatgtcacagggctcctctccgcc

SEQ ID NO: 4305 - RNA, 99 nt, synthetic construct
  source 1..99: mol_type = other RNA
gctgttacctttgccaagtgttccagccaccggcccagggcaatgaacacaaagagcatggggggcgtgtcgaagaatgtcacagggctcctctccgcc

SEQ ID NO: 4306 - RNA, 100 nt, synthetic construct
  source 1..100: mol_type = other RNA
tgctgttacctttgccaagtgttccagccaccggcccagggcaatgaacacaaagagcatggggggcgtgtcgaagaatgtcacagggctcctctccgcc

SEQ ID NO: 4307 - RNA, 16 nt, synthetic construct
  source 1..16: mol_type = other RNA
gtggctgagaaggcgg

SEQ ID NO: 4308 - RNA, 17 nt, synthetic construct
  source 1..17: mol_type = other RNA
tgtggctgagaaggcgg

SEQ ID NO: 4309 - RNA, 18 nt, synthetic construct
  source 1..18: mol_type = other RNA
ctgtggctgagaaggcgg

SEQ ID NO: 4310 - RNA, 19 nt, synthetic construct
  source 1..19: mol_type = other RNA
gctgtggctgagaaggcgg

SEQ ID NO: 4311 - RNA, 20 nt, synthetic construct
  source 1..20: mol_type = other RNA
tgctgtggctgagaaggcgg

SEQ ID NO: 4312 - RNA, 21 nt, synthetic construct
  source 1..21: mol_type = other RNA
ttgctgtggctgagaaggcgg

SEQ ID NO: 4313 - RNA, 22 nt, synthetic construct
  source 1..22: mol_type = other RNA
gttgctgtggctgagaaggcgg

SEQ ID NO: 4314-4320 - skipped (7 entries)

SEQ ID NO: 4321 - RNA, 10 nt, synthetic construct
  source 1..10: mol_type = other RNA
ccttctcagc

SEQ ID NO: 4322 - RNA, 11 nt, synthetic construct
  source 1..11: mol_type = other RNA
ccttctcagcc

SEQ ID NO: 4323 - RNA, 12 nt, synthetic construct
  source 1..12: mol_type = other RNA
ccttctcagcca

SEQ ID NO: 4324 - RNA, 13 nt, synthetic construct
  source 1..13: mol_type = other RNA
ccttctcagccac

SEQ ID NO: 4325 - RNA, 14 nt, synthetic construct
  source 1..14: mol_type = other RNA
ccttctcagccaca

SEQ ID NO: 4326 - RNA, 15 nt, synthetic construct
  source 1..15: mol_type = other RNA
ccttctcagccacag

SEQ ID NO: 4327 - RNA, 16 nt, synthetic construct
  source 1..16: mol_type = other RNA
ccttctcagccacagc

SEQ ID NO: 4328 - RNA, 17 nt, synthetic construct
  source 1..17: mol_type = other RNA
ccttctcagccacagca

SEQ ID NO: 4329 - RNA, 18 nt, synthetic construct
  source 1..18: mol_type = other RNA
ccttctcagccacagcaa

SEQ ID NO: 4330 - RNA, 19 nt, synthetic construct
  source 1..19: mol_type = other RNA
ccttctcagccacagcaac

SEQ ID NO: 4331 - RNA, 67 nt, synthetic construct
  source 1..67: mol_type = other RNA
cggcccagggcaatgaacacaaagagcatggggggcgtgtcgaagaatgtcacagggctgcgctccg

SEQ ID NO: 4332 - RNA, 67 nt, synthetic construct
  source 1..67: mol_type = other RNA
cggcccagggcaatgaacacaaagagcatggggggcgtgtcgaagaatgtcacagggctacgttccg

SEQ ID NO: 4333 - RNA, 67 nt, synthetic construct
  source 1..67: mol_type = other RNA
cggcccagggcaatgaacacaaagagcatggggggcgtgtcgaagaatgtcacagggctccgctccg

SEQ ID NO: 4334 - RNA, 67 nt, synthetic construct
  source 1..67: mol_type = other RNA
cggcccagggcaatgaacacaaagagcatggggggcgtgtcgaagaatgtcacagggctcctttccg

SEQ ID NO: 4335 - RNA, 67 nt, synthetic construct
  source 1..67: mol_type = other RNA
cggcccagggcaatgaacacaaagagcatggggggcgtgtcgaagaatgtcacagggcttcgctccg

SEQ ID NO: 4336 - RNA, 67 nt, synthetic construct
  source 1..67: mol_type = other RNA
cggcccagggcaatgaacacaaagagcatggggggcgtgtcgaagaatgtcacagggctcctctccg

SEQ ID NO: 4337 - RNA, 67 nt, synthetic construct
  source 1..67: mol_type = other RNA
cggcccagggcaatgaacacaaagagcatggggggcgtgtcgaagaatgtcacagggctacgctccg

SEQ ID NO: 4338 - RNA, 67 nt, synthetic construct
  source 1..67: mol_type = other RNA
cggcccagggcaatgaacacaaagagcatggggggcgtgtcgaagaatgtcacagggctccgttccg

SEQ ID NO: 4339 - RNA, 67 nt, synthetic construct
  source 1..67: mol_type = other RNA
cggcccagggcaatgaacacaaagagcatggggggcgtgtcgaagaatgtcacagggctgcgttccg

SEQ ID NO: 4340 - RNA, 67 nt, synthetic construct
  source 1..67: mol_type = other RNA
cggcccagggcaatgaacacaaagagcatggggggcgtgtcgaagaatgtcacagggcttcgttccg

SEQ ID NO: 4341 - RNA, 68 nt, synthetic construct
  source 1..68: mol_type = other RNA
ccggcccagggcaatgaacacaaagagcatggggggcgtgtcgaagaatgtcacagggctgcgctccg

SEQ ID NO: 4342 - RNA, 68 nt, synthetic construct
  source 1..68: mol_type = other RNA
ccggcccagggcaatgaacacaaagagcatggggggcgtgtcgaagaatgtcacagggctcctttccg

SEQ ID NO: 4343 - RNA, 68 nt, synthetic construct
  source 1..68: mol_type = other RNA
ccggcccagggcaatgaacacaaagagcatggggggcgtgtcgaagaatgtcacagggctccgctccg

SEQ ID NO: 4344 - RNA, 68 nt, synthetic construct
  source 1..68: mol_type = other RNA
ccggcccagggcaatgaacacaaagagcatggggggcgtgtcgaagaatgtcacagggctacgctccg

SEQ ID NO: 4345 - RNA, 68 nt, synthetic construct
  source 1..68: mol_type = other RNA
ccggcccagggcaatgaacacaaagagcatggggggcgtgtcgaagaatgtcacagggctccgttccg

SEQ ID NO: 4346 - RNA, 68 nt, synthetic construct
  source 1..68: mol_type = other RNA
ccggcccagggcaatgaacacaaagagcatggggggcgtgtcgaagaatgtcacagggcttcgttccg

SEQ ID NO: 4347 - RNA, 68 nt, synthetic construct
  source 1..68: mol_type = other RNA
ccggcccagggcaatgaacacaaagagcatggggggcgtgtcgaagaatgtcacagggctgcgttccg

SEQ ID NO: 4348 - RNA, 68 nt, synthetic construct
  source 1..68: mol_type = other RNA
ccggcccagggcaatgaacacaaagagcatggggggcgtgtcgaagaatgtcacagggctcctctccg

SEQ ID NO: 4349 - RNA, 68 nt, synthetic construct
  source 1..68: mol_type = other RNA
ccggcccagggcaatgaacacaaagagcatggggggcgtgtcgaagaatgtcacagggctacgttccg

SEQ ID NO: 4350 - RNA, 68 nt, synthetic construct
  source 1..68: mol_type = other RNA
ccggcccagggcaatgaacacaaagagcatggggggcgtgtcgaagaatgtcacagggcttcgctccg

SEQ ID NO: 4351 - RNA, 69 nt, synthetic construct
  source 1..69: mol_type = other RNA
accggcccagggcaatgaacacaaagagcatggggggcgtgtcgaagaatgtcacagggctccgctccg

SEQ ID NO: 4352 - RNA, 69 nt, synthetic construct
  source 1..69: mol_type = other RNA
accggcccagggcaatgaacacaaagagcatggggggcgtgtcgaagaatgtcacagggctcctttccg

SEQ ID NO: 4353 - RNA, 69 nt, synthetic construct
  source 1..69: mol_type = other RNA
accggcccagggcaatgaacacaaagagcatggggggcgtgtcgaagaatgtcacagggcttcgttccg

SEQ ID NO: 4354 - RNA, 69 nt, synthetic construct
  source 1..69: mol_type = other RNA
accggcccagggcaatgaacacaaagagcatggggggcgtgtcgaagaatgtcacagggctacgttccg

SEQ ID NO: 4355 - RNA, 69 nt, synthetic construct
  source 1..69: mol_type = other RNA
accggcccagggcaatgaacacaaagagcatggggggcgtgtcgaagaatgtcacagggctgcgctccg

SEQ ID NO: 4356 - RNA, 69 nt, synthetic construct
  source 1..69: mol_type = other RNA
accggcccagggcaatgaacacaaagagcatggggggcgtgtcgaagaatgtcacagggctcctctccg

SEQ ID NO: 4357 - RNA, 69 nt, synthetic construct
  source 1..69: mol_type = other RNA
accggcccagggcaatgaacacaaagagcatggggggcgtgtcgaagaatgtcacagggcttcgctccg

SEQ ID NO: 4358 - RNA, 69 nt, synthetic construct
  source 1..69: mol_type = other RNA
accggcccagggcaatgaacacaaagagcatggggggcgtgtcgaagaatgtcacagggctgcgttccg

SEQ ID NO: 4359 - RNA, 69 nt, synthetic construct
  source 1..69: mol_type = other RNA
accggcccagggcaatgaacacaaagagcatggggggcgtgtcgaagaatgtcacagggctacgctccg

SEQ ID NO: 4360 - RNA, 69 nt, synthetic construct
  source 1..69: mol_type = other RNA
accggcccagggcaatgaacacaaagagcatggggggcgtgtcgaagaatgtcacagggctccgttccg

SEQ ID NO: 4361 - RNA, 70 nt, synthetic construct
  source 1..70: mol_type = other RNA
caccggcccagggcaatgaacacaaagagcatggggggcgtgtcgaagaatgtcacagggctacgttccg

SEQ ID NO: 4362 - RNA, 70 nt, synthetic construct
  source 1..70: mol_type = other RNA
caccggcccagggcaatgaacacaaagagcatggggggcgtgtcgaagaatgtcacagggctccgttccg

SEQ ID NO: 4363 - RNA, 70 nt, synthetic construct
  source 1..70: mol_type = other RNA
caccggcccagggcaatgaacacaaagagcatggggggcgtgtcgaagaatgtcacagggcttcgctccg

SEQ ID NO: 4364 - RNA, 70 nt, synthetic construct
  source 1..70: mol_type = other RNA
caccggcccagggcaatgaacacaaagagcatggggggcgtgtcgaagaatgtcacagggctccgctccg

SEQ ID NO: 4365 - RNA, 70 nt, synthetic construct
  source 1..70: mol_type = other RNA
caccggcccagggcaatgaacacaaagagcatggggggcgtgtcgaagaatgtcacagggctgcgttccg

SEQ ID NO: 4366 - RNA, 70 nt, synthetic construct
  source 1..70: mol_type = other RNA
caccggcccagggcaatgaacacaaagagcatggggggcgtgtcgaagaatgtcacagggcttcgttccg

SEQ ID NO: 4367 - RNA, 70 nt, synthetic construct
  source 1..70: mol_type = other RNA
caccggcccagggcaatgaacacaaagagcatggggggcgtgtcgaagaatgtcacagggctcctttccg

SEQ ID NO: 4368 - RNA, 70 nt, synthetic construct
  source 1..70: mol_type = other RNA
caccggcccagggcaatgaacacaaagagcatggggggcgtgtcgaagaatgtcacagggctcctctccg

SEQ ID NO: 4369 - RNA, 70 nt, synthetic construct
  source 1..70: mol_type = other RNA
caccggcccagggcaatgaacacaaagagcatggggggcgtgtcgaagaatgtcacagggctgcgctccg

SEQ ID NO: 4370 - RNA, 70 nt, synthetic construct
  source 1..70: mol_type = other RNA
caccggcccagggcaatgaacacaaagagcatggggggcgtgtcgaagaatgtcacagggctacgctccg

SEQ ID NO: 4371 - RNA, 71 nt, synthetic construct
  source 1..71: mol_type = other RNA
ccaccggcccagggcaatgaacacaaagagcatggggggcgtgtcgaagaatgtcacagggctccgctccg

SEQ ID NO: 4372 - RNA, 71 nt, synthetic construct
  source 1..71: mol_type = other RNA
ccaccggcccagggcaatgaacacaaagagcatggggggcgtgtcgaagaatgtcacagggctccgttccg

SEQ ID NO: 4373 - RNA, 71 nt, synthetic construct
  source 1..71: mol_type = other RNA
ccaccggcccagggcaatgaacacaaagagcatggggggcgtgtcgaagaatgtcacagggctcctctccg

SEQ ID NO: 4374 - RNA, 71 nt, synthetic construct
  source 1..71: mol_type = other RNA
ccaccggcccagggcaatgaacacaaagagcatggggggcgtgtcgaagaatgtcacagggcttcgttccg

SEQ ID NO: 4375 - RNA, 71 nt, synthetic construct
  source 1..71: mol_type = other RNA
ccaccggcccagggcaatgaacacaaagagcatggggggcgtgtcgaagaatgtcacagggctacgttccg

SEQ ID NO: 4376 - RNA, 71 nt, synthetic construct
  source 1..71: mol_type = other RNA
ccaccggcccagggcaatgaacacaaagagcatggggggcgtgtcgaagaatgtcacagggctacgctccg

SEQ ID NO: 4377 - RNA, 71 nt, synthetic construct
  source 1..71: mol_type = other RNA
ccaccggcccagggcaatgaacacaaagagcatggggggcgtgtcgaagaatgtcacagggctgcgctccg

SEQ ID NO: 4378 - RNA, 71 nt, synthetic construct
  source 1..71: mol_type = other RNA
ccaccggcccagggcaatgaacacaaagagcatggggggcgtgtcgaagaatgtcacagggcttcgctccg

SEQ ID NO: 4379 - RNA, 71 nt, synthetic construct
  source 1..71: mol_type = other RNA
ccaccggcccagggcaatgaacacaaagagcatggggggcgtgtcgaagaatgtcacagggctgcgttccg

SEQ ID NO: 4380 - RNA, 71 nt, synthetic construct
  source 1..71: mol_type = other RNA
ccaccggcccagggcaatgaacacaaagagcatggggggcgtgtcgaagaatgtcacagggctcctttccg

SEQ ID NO: 4381 - RNA, 72 nt, synthetic construct
  source 1..72: mol_type = other RNA
gccaccggcccagggcaatgaacacaaagagcatggggggcgtgtcgaagaatgtcacagggctgcgctccg

SEQ ID NO: 4382 - RNA, 72 nt, synthetic construct
  source 1..72: mol_type = other RNA
gccaccggcccagggcaatgaacacaaagagcatggggggcgtgtcgaagaatgtcacagggcttcgttccg

SEQ ID NO: 4383 - RNA, 72 nt, synthetic construct
  source 1..72: mol_type = other RNA
gccaccggcccagggcaatgaacacaaagagcatggggggcgtgtcgaagaatgtcacagggctcctctccg

SEQ ID NO: 4384 - RNA, 72 nt, synthetic construct
  source 1..72: mol_type = other RNA
gccaccggcccagggcaatgaacacaaagagcatggggggcgtgtcgaagaatgtcacagggctccgctccg

SEQ ID NO: 4385 - RNA, 72 nt, synthetic construct
  source 1..72: mol_type = other RNA
gccaccggcccagggcaatgaacacaaagagcatggggggcgtgtcgaagaatgtcacagggctcctttccg

SEQ ID NO: 4386 - RNA, 72 nt, synthetic construct
  source 1..72: mol_type = other RNA
gccaccggcccagggcaatgaacacaaagagcatggggggcgtgtcgaagaatgtcacagggctgcgttccg

SEQ ID NO: 4387 - RNA, 72 nt, synthetic construct
  source 1..72: mol_type = other RNA
gccaccggcccagggcaatgaacacaaagagcatggggggcgtgtcgaagaatgtcacagggcttcgctccg

SEQ ID NO: 4388 - RNA, 72 nt, synthetic construct
  source 1..72: mol_type = other RNA
gccaccggcccagggcaatgaacacaaagagcatggggggcgtgtcgaagaatgtcacagggctacgctccg

SEQ ID NO: 4389 - RNA, 72 nt, synthetic construct
  source 1..72: mol_type = other RNA
gccaccggcccagggcaatgaacacaaagagcatggggggcgtgtcgaagaatgtcacagggctccgttccg

SEQ ID NO: 4390 - RNA, 72 nt, synthetic construct
  source 1..72: mol_type = other RNA
gccaccggcccagggcaatgaacacaaagagcatggggggcgtgtcgaagaatgtcacagggctacgttccg

SEQ ID NO: 4391 - RNA, 73 nt, synthetic construct
  source 1..73: mol_type = other RNA
agccaccggcccagggcaatgaacacaaagagcatggggggcgtgtcgaagaatgtcacagggctgcgttccg

SEQ ID NO: 4392 - RNA, 73 nt, synthetic construct
  source 1..73: mol_type = other RNA
agccaccggcccagggcaatgaacacaaagagcatggggggcgtgtcgaagaatgtcacagggcttcgctccg

SEQ ID NO: 4393 - RNA, 73 nt, synthetic construct
  source 1..73: mol_type = other RNA
agccaccggcccagggcaatgaacacaaagagcatggggggcgtgtcgaagaatgtcacagggctgcgctccg

SEQ ID NO: 4394 - RNA, 73 nt, synthetic construct
  source 1..73: mol_type = other RNA
agccaccggcccagggcaatgaacacaaagagcatggggggcgtgtcgaagaatgtcacagggctcctttccg

SEQ ID NO: 4395 - RNA, 73 nt, synthetic construct
  source 1..73: mol_type = other RNA
agccaccggcccagggcaatgaacacaaagagcatggggggcgtgtcgaagaatgtcacagggctccgttccg

SEQ ID NO: 4396 - RNA, 73 nt, synthetic construct
  source 1..73: mol_type = other RNA
agccaccggcccagggcaatgaacacaaagagcatggggggcgtgtcgaagaatgtcacagggctacgctccg

SEQ ID NO: 4397 - RNA, 73 nt, synthetic construct
  source 1..73: mol_type = other RNA
agccaccggcccagggcaatgaacacaaagagcatggggggcgtgtcgaagaatgtcacagggctacgttccg

SEQ ID NO: 4398 - RNA, 73 nt, synthetic construct
  source 1..73: mol_type = other RNA
agccaccggcccagggcaatgaacacaaagagcatggggggcgtgtcgaagaatgtcacagggctcctctccg

SEQ ID NO: 4399 - RNA, 73 nt, synthetic construct
  source 1..73: mol_type = other RNA
agccaccggcccagggcaatgaacacaaagagcatggggggcgtgtcgaagaatgtcacagggcttcgttccg

SEQ ID NO: 4400 - RNA, 73 nt, synthetic construct
  source 1..73: mol_type = other RNA
agccaccggcccagggcaatgaacacaaagagcatggggggcgtgtcgaagaatgtcacagggctccgctccg

SEQ ID NO: 4401 - RNA, 74 nt, synthetic construct
  source 1..74: mol_type = other RNA
cagccaccggcccagggcaatgaacacaaagagcatggggggcgtgtcgaagaatgtcacagggctacgctccg

SEQ ID NO: 4402 - RNA, 74 nt, synthetic construct
  source 1..74: mol_type = other RNA
cagccaccggcccagggcaatgaacacaaagagcatggggggcgtgtcgaagaatgtcacagggcttcgctccg

SEQ ID NO: 4403 - RNA, 74 nt, synthetic construct
  source 1..74: mol_type = other RNA
cagccaccggcccagggcaatgaacacaaagagcatggggggcgtgtcgaagaatgtcacagggctgcgctccg

SEQ ID NO: 4404 - RNA, 74 nt, synthetic construct
  source 1..74: mol_type = other RNA
cagccaccggcccagggcaatgaacacaaagagcatggggggcgtgtcgaagaatgtcacagggctcctttccg

SEQ ID NO: 4405 - RNA, 74 nt, synthetic construct
  source 1..74: mol_type = other RNA
cagccaccggcccagggcaatgaacacaaagagcatggggggcgtgtcgaagaatgtcacagggctcctctccg

SEQ ID NO: 4406 - RNA, 74 nt, synthetic construct
  source 1..74: mol_type = other RNA
cagccaccggcccagggcaatgaacacaaagagcatggggggcgtgtcgaagaatgtcacagggctgcgttccg

SEQ ID NO: 4407 - RNA, 74 nt, synthetic construct
  source 1..74: mol_type = other RNA
cagccaccggcccagggcaatgaacacaaagagcatggggggcgtgtcgaagaatgtcacagggctacgttccg

SEQ ID NO: 4408 - RNA, 74 nt, synthetic construct
  source 1..74: mol_type = other RNA
cagccaccggcccagggcaatgaacacaaagagcatggggggcgtgtcgaagaatgtcacagggcttcgttccg

SEQ ID NO: 4409 - RNA, 74 nt, synthetic construct
  source 1..74: mol_type = other RNA
cagccaccggcccagggcaatgaacacaaagagcatggggggcgtgtcgaagaatgtcacagggctccgttccg

SEQ ID NO: 4410 - RNA, 74 nt, synthetic construct
  source 1..74: mol_type = other RNA
cagccaccggcccagggcaatgaacacaaagagcatggggggcgtgtcgaagaatgtcacagggctccgctccg

SEQ ID NO: 4411 - RNA, 75 nt, synthetic construct
  source 1..75: mol_type = other RNA
ccagccaccggcccagggcaatgaacacaaagagcatggggggcgtgtcgaagaatgtcacagggctcctctccg

SEQ ID NO: 4412 - RNA, 75 nt, synthetic construct
  source 1..75: mol_type = other RNA
ccagccaccggcccagggcaatgaacacaaagagcatggggggcgtgtcgaagaatgtcacagggctcctttccg

SEQ ID NO: 4413 - RNA, 75 nt, synthetic construct
  source 1..75: mol_type = other RNA
ccagccaccggcccagggcaatgaacacaaagagcatggggggcgtgtcgaagaatgtcacagggctccgttccg

SEQ ID NO: 4414 - RNA, 75 nt, synthetic construct
  source 1..75: mol_type = other RNA
ccagccaccggcccagggcaatgaacacaaagagcatggggggcgtgtcgaagaatgtcacagggctgcgctccg

SEQ ID NO: 4415 - RNA, 75 nt, synthetic construct
  source 1..75: mol_type = other RNA
ccagccaccggcccagggcaatgaacacaaagagcatggggggcgtgtcgaagaatgtcacagggcttcgttccg

SEQ ID NO: 4416 - RNA, 75 nt, synthetic construct
  source 1..75: mol_type = other RNA
ccagccaccggcccagggcaatgaacacaaagagcatggggggcgtgtcgaagaatgtcacagggctgcgttccg

SEQ ID NO: 4417 - RNA, 75 nt, synthetic construct
  source 1..75: mol_type = other RNA
ccagccaccggcccagggcaatgaacacaaagagcatggggggcgtgtcgaagaatgtcacagggctacgttccg

SEQ ID NO: 4418 - RNA, 75 nt, synthetic construct
  source 1..75: mol_type = other RNA
ccagccaccggcccagggcaatgaacacaaagagcatggggggcgtgtcgaagaatgtcacagggctacgctccg

SEQ ID NO: 4419 - RNA, 75 nt, synthetic construct
  source 1..75: mol_type = other RNA
ccagccaccggcccagggcaatgaacacaaagagcatggggggcgtgtcgaagaatgtcacagggcttcgctccg

SEQ ID NO: 4420 - RNA, 75 nt, synthetic construct
  source 1..75: mol_type = other RNA
ccagccaccggcccagggcaatgaacacaaagagcatggggggcgtgtcgaagaatgtcacagggctccgctccg

SEQ ID NO: 4421 - RNA, 76 nt, synthetic construct
  source 1..76: mol_type = other RNA
tccagccaccggcccagggcaatgaacacaaagagcatggggggcgtgtcgaagaatgtcacagggcttcgttccg

SEQ ID NO: 4422 - RNA, 76 nt, synthetic construct
  source 1..76: mol_type = other RNA
tccagccaccggcccagggcaatgaacacaaagagcatggggggcgtgtcgaagaatgtcacagggctcctttccg

SEQ ID NO: 4423 - RNA, 76 nt, synthetic construct
  source 1..76: mol_type = other RNA
tccagccaccggcccagggcaatgaacacaaagagcatggggggcgtgtcgaagaatgtcacagggctccgctccg

SEQ ID NO: 4424 - RNA, 76 nt, synthetic construct
  source 1..76: mol_type = other RNA
tccagccaccggcccagggcaatgaacacaaagagcatggggggcgtgtcgaagaatgtcacagggctacgctccg

SEQ ID NO: 4425 - RNA, 76 nt, synthetic construct
  source 1..76: mol_type = other RNA
tccagccaccggcccagggcaatgaacacaaagagcatggggggcgtgtcgaagaatgtcacagggctccgttccg

SEQ ID NO: 4426 - RNA, 76 nt, synthetic construct
  source 1..76: mol_type = other RNA
tccagccaccggcccagggcaatgaacacaaagagcatggggggcgtgtcgaagaatgtcacagggctgcgttccg

SEQ ID NO: 4427 - RNA, 76 nt, synthetic construct
  source 1..76: mol_type = other RNA
tccagccaccggcccagggcaatgaacacaaagagcatggggggcgtgtcgaagaatgtcacagggctacgttccg

SEQ ID NO: 4428 - RNA, 76 nt, synthetic construct
  source 1..76: mol_type = other RNA
tccagccaccggcccagggcaatgaacacaaagagcatggggggcgtgtcgaagaatgtcacagggctcctctccg

SEQ ID NO: 4429 - RNA, 76 nt, synthetic construct
  source 1..76: mol_type = other RNA
tccagccaccggcccagggcaatgaacacaaagagcatggggggcgtgtcgaagaatgtcacagggcttcgctccg

SEQ ID NO: 4430 - RNA, 76 nt, synthetic construct
  source 1..76: mol_type = other RNA
tccagccaccggcccagggcaatgaacacaaagagcatggggggcgtgtcgaagaatgtcacagggctgcgctccg

SEQ ID NO: 4431 - RNA, 77 nt, synthetic construct
  source 1..77: mol_type = other RNA
ttccagccaccggcccagggcaatgaacacaaagagcatggggggcgtgtcgaagaatgtcacagggctccgctccg

SEQ ID NO: 4432 - RNA, 77 nt, synthetic construct
  source 1..77: mol_type = other RNA
ttccagccaccggcccagggcaatgaacacaaagagcatggggggcgtgtcgaagaatgtcacagggctacgttccg

SEQ ID NO: 4433 - RNA, 77 nt, synthetic construct
  source 1..77: mol_type = other RNA
ttccagccaccggcccagggcaatgaacacaaagagcatggggggcgtgtcgaagaatgtcacagggctgcgctccg

SEQ ID NO: 4434 - RNA, 77 nt, synthetic construct
  source 1..77: mol_type = other RNA
ttccagccaccggcccagggcaatgaacacaaagagcatggggggcgtgtcgaagaatgtcacagggctgcgttccg

SEQ ID NO: 4435 - RNA, 77 nt, synthetic construct
  source 1..77: mol_type = other RNA
ttccagccaccggcccagggcaatgaacacaaagagcatggggggcgtgtcgaagaatgtcacagggctccgttccg

SEQ ID NO: 4436 - RNA, 77 nt, synthetic construct
  source 1..77: mol_type = other RNA
ttccagccaccggcccagggcaatgaacacaaagagcatggggggcgtgtcgaagaatgtcacagggcttcgctccg

SEQ ID NO: 4437 - RNA, 77 nt, synthetic construct
  source 1..77: mol_type = other RNA
ttccagccaccggcccagggcaatgaacacaaagagcatggggggcgtgtcgaagaatgtcacagggctcctctccg

SEQ ID NO: 4438 - RNA, 77 nt, synthetic construct
  source 1..77: mol_type = other RNA
ttccagccaccggcccagggcaatgaacacaaagagcatggggggcgtgtcgaagaatgtcacagggctcctttccg

SEQ ID NO: 4439 - RNA, 77 nt, synthetic construct
  source 1..77: mol_type = other RNA
ttccagccaccggcccagggcaatgaacacaaagagcatggggggcgtgtcgaagaatgtcacagggcttcgttccg

SEQ ID NO: 4440 - RNA, 77 nt, synthetic construct
  source 1..77: mol_type = other RNA
ttccagccaccggcccagggcaatgaacacaaagagcatggggggcgtgtcgaagaatgtcacagggctacgctccg

SEQ ID NO: 4441 - RNA, 78 nt, synthetic construct
  source 1..78: mol_type = other RNA
gttccagccaccggcccagggcaatgaacacaaagagcatggggggcgtgtcgaagaatgtcacagggcttcgttccg

SEQ ID NO: 4442 - RNA, 78 nt, synthetic construct
  source 1..78: mol_type = other RNA
gttccagccaccggcccagggcaatgaacacaaagagcatggggggcgtgtcgaagaatgtcacagggctcctctccg

SEQ ID NO: 4443 - RNA, 78 nt, synthetic construct
  source 1..78: mol_type = other RNA
gttccagccaccggcccagggcaatgaacacaaagagcatggggggcgtgtcgaagaatgtcacagggctcctttccg

SEQ ID NO: 4444 - RNA, 78 nt, synthetic construct
  source 1..78: mol_type = other RNA
gttccagccaccggcccagggcaatgaacacaaagagcatggggggcgtgtcgaagaatgtcacagggctgcgctccg

SEQ ID NO: 4445 - RNA, 78 nt, synthetic construct
  source 1..78: mol_type = other RNA
gttccagccaccggcccagggcaatgaacacaaagagcatggggggcgtgtcgaagaatgtcacagggctccgttccg

SEQ ID NO: 4446 - RNA, 78 nt, synthetic construct
  source 1..78: mol_type = other RNA
gttccagccaccggcccagggcaatgaacacaaagagcatggggggcgtgtcgaagaatgtcacagggctccgctccg

SEQ ID NO: 4447 - RNA, 78 nt, synthetic construct
  source 1..78: mol_type = other RNA
gttccagccaccggcccagggcaatgaacacaaagagcatggggggcgtgtcgaagaatgtcacagggctacgttccg

SEQ ID NO: 4448 - RNA, 78 nt, synthetic construct
  source 1..78: mol_type = other RNA
gttccagccaccggcccagggcaatgaacacaaagagcatggggggcgtgtcgaagaatgtcacagggctgcgttccg

SEQ ID NO: 4449 - RNA, 78 nt, synthetic construct
  source 1..78: mol_type = other RNA
gttccagccaccggcccagggcaatgaacacaaagagcatggggggcgtgtcgaagaatgtcacagggcttcgctccg

SEQ ID NO: 4450 - RNA, 78 nt, synthetic construct
  source 1..78: mol_type = other RNA
gttccagccaccggcccagggcaatgaacacaaagagcatggggggcgtgtcgaagaatgtcacagggctacgctccg

SEQ ID NO: 4451 - RNA, 79 nt, synthetic construct
  source 1..79: mol_type = other RNA
tgttccagccaccggcccagggcaatgaacacaaagagcatggggggcgtgtcgaagaatgtcacagggctgcgttccg

SEQ ID NO: 4452 - RNA, 79 nt, synthetic construct
  source 1..79: mol_type = other RNA
tgttccagccaccggcccagggcaatgaacacaaagagcatggggggcgtgtcgaagaatgtcacagggcttcgttccg

SEQ ID NO: 4453 - RNA, 79 nt, synthetic construct
  source 1..79: mol_type = other RNA
tgttccagccaccggcccagggcaatgaacacaaagagcatggggggcgtgtcgaagaatgtcacagggctcctttccg

SEQ ID NO: 4454 - RNA, 79 nt, synthetic construct
  source 1..79: mol_type = other RNA
tgttccagccaccggcccagggcaatgaacacaaagagcatggggggcgtgtcgaagaatgtcacagggctacgttccg

SEQ ID NO: 4455 - RNA, 79 nt, synthetic construct
  source 1..79: mol_type = other RNA
tgttccagccaccggcccagggcaatgaacacaaagagcatggggggcgtgtcgaagaatgtcacagggctacgctccg

SEQ ID NO: 4456 - RNA, 79 nt, synthetic construct
  source 1..79: mol_type = other RNA
tgttccagccaccggcccagggcaatgaacacaaagagcatggggggcgtgtcgaagaatgtcacagggctcctctccg

SEQ ID NO: 4457 - RNA, 79 nt, synthetic construct
  source 1..79: mol_type = other RNA
tgttccagccaccggcccagggcaatgaacacaaagagcatggggggcgtgtcgaagaatgtcacagggctccgttccg

SEQ ID NO: 4458 - RNA, 79 nt, synthetic construct
  source 1..79: mol_type = other RNA
tgttccagccaccggcccagggcaatgaacacaaagagcatggggggcgtgtcgaagaatgtcacagggctccgctccg

SEQ ID NO: 4459 - RNA, 79 nt, synthetic construct
  source 1..79: mol_type = other RNA
tgttccagccaccggcccagggcaatgaacacaaagagcatggggggcgtgtcgaagaatgtcacagggctgcgctccg

SEQ ID NO: 4460 - RNA, 79 nt, synthetic construct
  source 1..79: mol_type = other RNA
tgttccagccaccggcccagggcaatgaacacaaagagcatggggggcgtgtcgaagaatgtcacagggcttcgctccg

SEQ ID NO: 4461 - RNA, 80 nt, synthetic construct
  source 1..80: mol_type = other RNA
gtgttccagccaccggcccagggcaatgaacacaaagagcatggggggcgtgtcgaagaatgtcacagggctcctctccg

SEQ ID NO: 4462 - RNA, 80 nt, synthetic construct
  source 1..80: mol_type = other RNA
gtgttccagccaccggcccagggcaatgaacacaaagagcatggggggcgtgtcgaagaatgtcacagggctccgctccg

SEQ ID NO: 4463 - RNA, 80 nt, synthetic construct
  source 1..80: mol_type = other RNA
gtgttccagccaccggcccagggcaatgaacacaaagagcatggggggcgtgtcgaagaatgtcacagggcttcgttccg

SEQ ID NO: 4464 - RNA, 80 nt, synthetic construct
  source 1..80: mol_type = other RNA
gtgttccagccaccggcccagggcaatgaacacaaagagcatggggggcgtgtcgaagaatgtcacagggctgcgttccg

SEQ ID NO: 4465 - RNA, 80 nt, synthetic construct
  source 1..80: mol_type = other RNA
gtgttccagccaccggcccagggcaatgaacacaaagagcatggggggcgtgtcgaagaatgtcacagggctcctttccg

SEQ ID NO: 4466 - RNA, 80 nt, synthetic construct
  source 1..80: mol_type = other RNA
gtgttccagccaccggcccagggcaatgaacacaaagagcatggggggcgtgtcgaagaatgtcacagggctccgttccg

SEQ ID NO: 4467 - RNA, 80 nt, synthetic construct
  source 1..80: mol_type = other RNA
gtgttccagccaccggcccagggcaatgaacacaaagagcatggggggcgtgtcgaagaatgtcacagggcttcgctccg

SEQ ID NO: 4468 - RNA, 80 nt, synthetic construct
  source 1..80: mol_type = other RNA
gtgttccagccaccggcccagggcaatgaacacaaagagcatggggggcgtgtcgaagaatgtcacagggctgcgctccg

SEQ ID NO: 4469 - RNA, 80 nt, synthetic construct
  source 1..80: mol_type = other RNA
gtgttccagccaccggcccagggcaatgaacacaaagagcatggggggcgtgtcgaagaatgtcacagggctacgctccg

SEQ ID NO: 4470 - RNA, 80 nt, synthetic construct
  source 1..80: mol_type = other RNA
gtgttccagccaccggcccagggcaatgaacacaaagagcatggggggcgtgtcgaagaatgtcacagggctacgttccg

SEQ ID NO: 4471 - RNA, 81 nt, synthetic construct
  source 1..81: mol_type = other RNA
agtgttccagccaccggcccagggcaatgaacacaaagagcatggggggcgtgtcgaagaatgtcacagggctgcgctccg

SEQ ID NO: 4472 - RNA, 81 nt, synthetic construct
  source 1..81: mol_type = other RNA
agtgttccagccaccggcccagggcaatgaacacaaagagcatggggggcgtgtcgaagaatgtcacagggctacgctccg

SEQ ID NO: 4473 - RNA, 81 nt, synthetic construct
  source 1..81: mol_type = other RNA
agtgttccagccaccggcccagggcaatgaacacaaagagcatggggggcgtgtcgaagaatgtcacagggcttcgctccg

SEQ ID NO: 4474 - RNA, 81 nt, synthetic construct
  source 1..81: mol_type = other RNA
agtgttccagccaccggcccagggcaatgaacacaaagagcatggggggcgtgtcgaagaatgtcacagggctccgctccg

SEQ ID NO: 4475 - RNA, 81 nt, synthetic construct
  source 1..81: mol_type = other RNA
agtgttccagccaccggcccagggcaatgaacacaaagagcatggggggcgtgtcgaagaatgtcacagggcttcgttccg

SEQ ID NO: 4476 - RNA, 81 nt, synthetic construct
  source 1..81: mol_type = other RNA
agtgttccagccaccggcccagggcaatgaacacaaagagcatggggggcgtgtcgaagaatgtcacagggctccgttccg

SEQ ID NO: 4477 - RNA, 81 nt, synthetic construct
  source 1..81: mol_type = other RNA
agtgttccagccaccggcccagggcaatgaacacaaagagcatggggggcgtgtcgaagaatgtcacagggctacgttccg

SEQ ID NO: 4478 - RNA, 81 nt, synthetic construct
  source 1..81: mol_type = other RNA
agtgttccagccaccggcccagggcaatgaacacaaagagcatggggggcgtgtcgaagaatgtcacagggctgcgttccg

SEQ ID NO: 4479 - RNA, 81 nt, synthetic construct
  source 1..81: mol_type = other RNA
agtgttccagccaccggcccagggcaatgaacacaaagagcatggggggcgtgtcgaagaatgtcacagggctcctctccg

SEQ ID NO: 4480 - RNA, 81 nt, synthetic construct
  source 1..81: mol_type = other RNA
agtgttccagccaccggcccagggcaatgaacacaaagagcatggggggcgtgtcgaagaatgtcacagggctcctttccg

SEQ ID NO: 4481 - RNA, 82 nt, synthetic construct
  source 1..82: mol_type = other RNA
aagtgttccagccaccggcccagggcaatgaacacaaagagcatggggggcgtgtcgaagaatgtcacagggctgcgttccg

SEQ ID NO: 4482 - RNA, 82 nt, synthetic construct
  source 1..82: mol_type = other RNA
aagtgttccagccaccggcccagggcaatgaacacaaagagcatggggggcgtgtcgaagaatgtcacagggctgcgctccg

SEQ ID NO: 4483 - RNA, 82 nt, synthetic construct
  source 1..82: mol_type = other RNA
aagtgttccagccaccggcccagggcaatgaacacaaagagcatggggggcgtgtcgaagaatgtcacagggctccgttccg

SEQ ID NO: 4484 - RNA, 82 nt, synthetic construct
  source 1..82: mol_type = other RNA
aagtgttccagccaccggcccagggcaatgaacacaaagagcatggggggcgtgtcgaagaatgtcacagggctcctttccg

SEQ ID NO: 4485 - RNA, 82 nt, synthetic construct
  source 1..82: mol_type = other RNA
aagtgttccagccaccggcccagggcaatgaacacaaagagcatggggggcgtgtcgaagaatgtcacagggctacgctccg

SEQ ID NO: 4486 - RNA, 82 nt, synthetic construct
  source 1..82: mol_type = other RNA
aagtgttccagccaccggcccagggcaatgaacacaaagagcatggggggcgtgtcgaagaatgtcacagggctccgctccg

SEQ ID NO: 4487 - RNA, 82 nt, synthetic construct
  source 1..82: mol_type = other RNA
aagtgttccagccaccggcccagggcaatgaacacaaagagcatggggggcgtgtcgaagaatgtcacagggcttcgttccg

SEQ ID NO: 4488 - RNA, 82 nt, synthetic construct
  source 1..82: mol_type = other RNA
aagtgttccagccaccggcccagggcaatgaacacaaagagcatggggggcgtgtcgaagaatgtcacagggctacgttccg

SEQ ID NO: 4489 - RNA, 82 nt, synthetic construct
  source 1..82: mol_type = other RNA
aagtgttccagccaccggcccagggcaatgaacacaaagagcatggggggcgtgtcgaagaatgtcacagggcttcgctccg

SEQ ID NO: 4490 - RNA, 82 nt, synthetic construct
  source 1..82: mol_type = other RNA
aagtgttccagccaccggcccagggcaatgaacacaaagagcatggggggcgtgtcgaagaatgtcacagggctcctctccg

SEQ ID NO: 4491 - RNA, 83 nt, synthetic construct
  source 1..83: mol_type = other RNA
caagtgttccagccaccggcccagggcaatgaacacaaagagcatggggggcgtgtcgaagaatgtcacagggctccgctccg

SEQ ID NO: 4492 - RNA, 83 nt, synthetic construct
  source 1..83: mol_type = other RNA
caagtgttccagccaccggcccagggcaatgaacacaaagagcatggggggcgtgtcgaagaatgtcacagggcttcgctccg

SEQ ID NO: 4493 - RNA, 83 nt, synthetic construct
  source 1..83: mol_type = other RNA
caagtgttccagccaccggcccagggcaatgaacacaaagagcatggggggcgtgtcgaagaatgtcacagggctcctttccg

SEQ ID NO: 4494 - RNA, 83 nt, synthetic construct
  source 1..83: mol_type = other RNA
caagtgttccagccaccggcccagggcaatgaacacaaagagcatggggggcgtgtcgaagaatgtcacagggctgcgttccg

SEQ ID NO: 4495 - RNA, 83 nt, synthetic construct
  source 1..83: mol_type = other RNA
caagtgttccagccaccggcccagggcaatgaacacaaagagcatggggggcgtgtcgaagaatgtcacagggcttcgttccg

SEQ ID NO: 4496 - RNA, 83 nt, synthetic construct
  source 1..83: mol_type = other RNA
caagtgttccagccaccggcccagggcaatgaacacaaagagcatggggggcgtgtcgaagaatgtcacagggctcctctccg

SEQ ID NO: 4497 - RNA, 83 nt, synthetic construct
  source 1..83: mol_type = other RNA
caagtgttccagccaccggcccagggcaatgaacacaaagagcatggggggcgtgtcgaagaatgtcacagggctgcgctccg

SEQ ID NO: 4498 - RNA, 83 nt, synthetic construct
  source 1..83: mol_type = other RNA
caagtgttccagccaccggcccagggcaatgaacacaaagagcatggggggcgtgtcgaagaatgtcacagggctacgttccg

SEQ ID NO: 4499 - RNA, 83 nt, synthetic construct
  source 1..83: mol_type = other RNA
caagtgttccagccaccggcccagggcaatgaacacaaagagcatggggggcgtgtcgaagaatgtcacagggctccgttccg

SEQ ID NO: 4500 - RNA, 83 nt, synthetic construct
  source 1..83: mol_type = other RNA
caagtgttccagccaccggcccagggcaatgaacacaaagagcatggggggcgtgtcgaagaatgtcacagggctacgctccg

SEQ ID NO: 4501 - RNA, 84 nt, synthetic construct
  source 1..84: mol_type = other RNA
ccaagtgttccagccaccggcccagggcaatgaacacaaagagcatggggggcgtgtcgaagaatgtcacagggctacgttccg

SEQ ID NO: 4502 - RNA, 84 nt, synthetic construct
  source 1..84: mol_type = other RNA
ccaagtgttccagccaccggcccagggcaatgaacacaaagagcatggggggcgtgtcgaagaatgtcacagggctcctctccg

SEQ ID NO: 4503 - RNA, 84 nt, synthetic construct
  source 1..84: mol_type = other RNA
ccaagtgttccagccaccggcccagggcaatgaacacaaagagcatggggggcgtgtcgaagaatgtcacagggctccgctccg

SEQ ID NO: 4504 - RNA, 84 nt, synthetic construct
  source 1..84: mol_type = other RNA
ccaagtgttccagccaccggcccagggcaatgaacacaaagagcatggggggcgtgtcgaagaatgtcacagggctccgttccg

SEQ ID NO: 4505 - RNA, 84 nt, synthetic construct
  source 1..84: mol_type = other RNA
ccaagtgttccagccaccggcccagggcaatgaacacaaagagcatggggggcgtgtcgaagaatgtcacagggcttcgttccg

SEQ ID NO: 4506 - RNA, 84 nt, synthetic construct
  source 1..84: mol_type = other RNA
ccaagtgttccagccaccggcccagggcaatgaacacaaagagcatggggggcgtgtcgaagaatgtcacagggctgcgctccg

SEQ ID NO: 4507 - RNA, 84 nt, synthetic construct
  source 1..84: mol_type = other RNA
ccaagtgttccagccaccggcccagggcaatgaacacaaagagcatggggggcgtgtcgaagaatgtcacagggctcctttccg

SEQ ID NO: 4508 - RNA, 84 nt, synthetic construct
  source 1..84: mol_type = other RNA
ccaagtgttccagccaccggcccagggcaatgaacacaaagagcatggggggcgtgtcgaagaatgtcacagggctgcgttccg

SEQ ID NO: 4509 - RNA, 84 nt, synthetic construct
  source 1..84: mol_type = other RNA
ccaagtgttccagccaccggcccagggcaatgaacacaaagagcatggggggcgtgtcgaagaatgtcacagggctacgctccg

SEQ ID NO: 4510 - RNA, 84 nt, synthetic construct
  source 1..84: mol_type = other RNA
ccaagtgttccagccaccggcccagggcaatgaacacaaagagcatggggggcgtgtcgaagaatgtcacagggcttcgctccg

SEQ ID NO: 4511 - RNA, 85 nt, synthetic construct
  source 1..85: mol_type = other RNA
gccaagtgttccagccaccggcccagggcaatgaacacaaagagcatggggggcgtgtcgaagaatgtcacagggctacgctccg

SEQ ID NO: 4512 - RNA, 85 nt, synthetic construct
  source 1..85: mol_type = other RNA
gccaagtgttccagccaccggcccagggcaatgaacacaaagagcatggggggcgtgtcgaagaatgtcacagggcttcgctccg

SEQ ID NO: 4513 - RNA, 85 nt, synthetic construct
  source 1..85: mol_type = other RNA
gccaagtgttccagccaccggcccagggcaatgaacacaaagagcatggggggcgtgtcgaagaatgtcacagggctccgttccg

SEQ ID NO: 4514 - RNA, 85 nt, synthetic construct
  source 1..85: mol_type = other RNA
gccaagtgttccagccaccggcccagggcaatgaacacaaagagcatggggggcgtgtcgaagaatgtcacagggctcctctccg

SEQ ID NO: 4515 - RNA, 85 nt, synthetic construct
  source 1..85: mol_type = other RNA
gccaagtgttccagccaccggcccagggcaatgaacacaaagagcatggggggcgtgtcgaagaatgtcacagggcttcgttccg

SEQ ID NO: 4516 - RNA, 85 nt, synthetic construct
  source 1..85: mol_type = other RNA
gccaagtgttccagccaccggcccagggcaatgaacacaaagagcatggggggcgtgtcgaagaatgtcacagggctgcgttccg

SEQ ID NO: 4517 - RNA, 85 nt, synthetic construct
  source 1..85: mol_type = other RNA
gccaagtgttccagccaccggcccagggcaatgaacacaaagagcatggggggcgtgtcgaagaatgtcacagggctcctttccg

SEQ ID NO: 4518 - RNA, 85 nt, synthetic construct
  source 1..85: mol_type = other RNA
gccaagtgttccagccaccggcccagggcaatgaacacaaagagcatggggggcgtgtcgaagaatgtcacagggctacgttccg

SEQ ID NO: 4519 - RNA, 85 nt, synthetic construct
  source 1..85: mol_type = other RNA
gccaagtgttccagccaccggcccagggcaatgaacacaaagagcatggggggcgtgtcgaagaatgtcacagggctgcgctccg

SEQ ID NO: 4520 - RNA, 85 nt, synthetic construct
  source 1..85: mol_type = other RNA
gccaagtgttccagccaccggcccagggcaatgaacacaaagagcatggggggcgtgtcgaagaatgtcacagggctccgctccg

SEQ ID NO: 4521 - RNA, 86 nt, synthetic construct
  source 1..86: mol_type = other RNA
tgccaagtgttccagccaccggcccagggcaatgaacacaaagagcatggggggcgtgtcgaagaatgtcacagggcttcgttccg

SEQ ID NO: 4522 - RNA, 86 nt, synthetic construct
  source 1..86: mol_type = other RNA
tgccaagtgttccagccaccggcccagggcaatgaacacaaagagcatggggggcgtgtcgaagaatgtcacagggctacgttccg

SEQ ID NO: 4523 - RNA, 86 nt, synthetic construct
  source 1..86: mol_type = other RNA
tgccaagtgttccagccaccggcccagggcaatgaacacaaagagcatggggggcgtgtcgaagaatgtcacagggctcctttccg

SEQ ID NO: 4524 - RNA, 86 nt, synthetic construct
  source 1..86: mol_type = other RNA
tgccaagtgttccagccaccggcccagggcaatgaacacaaagagcatggggggcgtgtcgaagaatgtcacagggctccgctccg

SEQ ID NO: 4525 - RNA, 86 nt, synthetic construct
  source 1..86: mol_type = other RNA
tgccaagtgttccagccaccggcccagggcaatgaacacaaagagcatggggggcgtgtcgaagaatgtcacagggctacgctccg

SEQ ID NO: 4526 - RNA, 86 nt, synthetic construct
  source 1..86: mol_type = other RNA
tgccaagtgttccagccaccggcccagggcaatgaacacaaagagcatggggggcgtgtcgaagaatgtcacagggctgcgctccg

SEQ ID NO: 4527 - RNA, 86 nt, synthetic construct
  source 1..86: mol_type = other RNA
tgccaagtgttccagccaccggcccagggcaatgaacacaaagagcatggggggcgtgtcgaagaatgtcacagggctcctctccg

SEQ ID NO: 4528 - RNA, 86 nt, synthetic construct
  source 1..86: mol_type = other RNA
tgccaagtgttccagccaccggcccagggcaatgaacacaaagagcatggggggcgtgtcgaagaatgtcacagggcttcgctccg

SEQ ID NO: 4529 - RNA, 86 nt, synthetic construct
  source 1..86: mol_type = other RNA
tgccaagtgttccagccaccggcccagggcaatgaacacaaagagcatggggggcgtgtcgaagaatgtcacagggctccgttccg

SEQ ID NO: 4530 - RNA, 86 nt, synthetic construct
  source 1..86: mol_type = other RNA
tgccaagtgttccagccaccggcccagggcaatgaacacaaagagcatggggggcgtgtcgaagaatgtcacagggctgcgttccg

SEQ ID NO: 4531 - RNA, 87 nt, synthetic construct
  source 1..87: mol_type = other RNA
ttgccaagtgttccagccaccggcccagggcaatgaacacaaagagcatggggggcgtgtcgaagaatgtcacagggctcctctccg

SEQ ID NO: 4532 - RNA, 87 nt, synthetic construct
  source 1..87: mol_type = other RNA
ttgccaagtgttccagccaccggcccagggcaatgaacacaaagagcatggggggcgtgtcgaagaatgtcacagggctcctttccg

SEQ ID NO: 4533 - RNA, 87 nt, synthetic construct
  source 1..87: mol_type = other RNA
ttgccaagtgttccagccaccggcccagggcaatgaacacaaagagcatggggggcgtgtcgaagaatgtcacagggctacgctccg

SEQ ID NO: 4534 - RNA, 87 nt, synthetic construct
  source 1..87: mol_type = other RNA
ttgccaagtgttccagccaccggcccagggcaatgaacacaaagagcatggggggcgtgtcgaagaatgtcacagggcttcgctccg

SEQ ID NO: 4535 - RNA, 87 nt, synthetic construct
  source 1..87: mol_type = other RNA
ttgccaagtgttccagccaccggcccagggcaatgaacacaaagagcatggggggcgtgtcgaagaatgtcacagggctacgttccg

SEQ ID NO: 4536 - RNA, 87 nt, synthetic construct
  source 1..87: mol_type = other RNA
ttgccaagtgttccagccaccggcccagggcaatgaacacaaagagcatggggggcgtgtcgaagaatgtcacagggctgcgttccg

SEQ ID NO: 4537 - RNA, 87 nt, synthetic construct
  source 1..87: mol_type = other RNA
ttgccaagtgttccagccaccggcccagggcaatgaacacaaagagcatggggggcgtgtcgaagaatgtcacagggctccgttccg

SEQ ID NO: 4538 - RNA, 87 nt, synthetic construct
  source 1..87: mol_type = other RNA
ttgccaagtgttccagccaccggcccagggcaatgaacacaaagagcatggggggcgtgtcgaagaatgtcacagggcttcgttccg

SEQ ID NO: 4539 - RNA, 87 nt, synthetic construct
  source 1..87: mol_type = other RNA
ttgccaagtgttccagccaccggcccagggcaatgaacacaaagagcatggggggcgtgtcgaagaatgtcacagggctccgctccg

SEQ ID NO: 4540 - RNA, 87 nt, synthetic construct
  source 1..87: mol_type = other RNA
ttgccaagtgttccagccaccggcccagggcaatgaacacaaagagcatggggggcgtgtcgaagaatgtcacagggctgcgctccg

SEQ ID NO: 4541 - RNA, 88 nt, synthetic construct
  source 1..88: mol_type = other RNA
tttgccaagtgttccagccaccggcccagggcaatgaacacaaagagcatggggggcgtgtcgaagaatgtcacagggctgcgttccg

SEQ ID NO: 4542 - RNA, 88 nt, synthetic construct
  source 1..88: mol_type = other RNA
tttgccaagtgttccagccaccggcccagggcaatgaacacaaagagcatggggggcgtgtcgaagaatgtcacagggcttcgttccg

SEQ ID NO: 4543 - RNA, 88 nt, synthetic construct
  source 1..88: mol_type = other RNA
tttgccaagtgttccagccaccggcccagggcaatgaacacaaagagcatggggggcgtgtcgaagaatgtcacagggctacgttccg

SEQ ID NO: 4544 - RNA, 88 nt, synthetic construct
  source 1..88: mol_type = other RNA
tttgccaagtgttccagccaccggcccagggcaatgaacacaaagagcatggggggcgtgtcgaagaatgtcacagggctcctctccg

SEQ ID NO: 4545 - RNA, 88 nt, synthetic construct
  source 1..88: mol_type = other RNA
tttgccaagtgttccagccaccggcccagggcaatgaacacaaagagcatggggggcgtgtcgaagaatgtcacagggctacgctccg

SEQ ID NO: 4546 - RNA, 88 nt, synthetic construct
  source 1..88: mol_type = other RNA
tttgccaagtgttccagccaccggcccagggcaatgaacacaaagagcatggggggcgtgtcgaagaatgtcacagggctcctttccg

SEQ ID NO: 4547 - RNA, 88 nt, synthetic construct
  source 1..88: mol_type = other RNA
tttgccaagtgttccagccaccggcccagggcaatgaacacaaagagcatggggggcgtgtcgaagaatgtcacagggctccgttccg

SEQ ID NO: 4548 - RNA, 88 nt, synthetic construct
  source 1..88: mol_type = other RNA
tttgccaagtgttccagccaccggcccagggcaatgaacacaaagagcatggggggcgtgtcgaagaatgtcacagggctgcgctccg

SEQ ID NO: 4549 - RNA, 88 nt, synthetic construct
  source 1..88: mol_type = other RNA
tttgccaagtgttccagccaccggcccagggcaatgaacacaaagagcatggggggcgtgtcgaagaatgtcacagggctccgctccg

SEQ ID NO: 4550 - RNA, 88 nt, synthetic construct
  source 1..88: mol_type = other RNA
tttgccaagtgttccagccaccggcccagggcaatgaacacaaagagcatggggggcgtgtcgaagaatgtcacagggcttcgctccg

SEQ ID NO: 4551 - RNA, 89 nt, synthetic construct
  source 1..89: mol_type = other RNA
ctttgccaagtgttccagccaccggcccagggcaatgaacacaaagagcatggggggcgtgtcgaagaatgtcacagggctcctctccg

SEQ ID NO: 4552 - RNA, 89 nt, synthetic construct
  source 1..89: mol_type = other RNA
ctttgccaagtgttccagccaccggcccagggcaatgaacacaaagagcatggggggcgtgtcgaagaatgtcacagggcttcgctccg

SEQ ID NO: 4553 - RNA, 89 nt, synthetic construct
  source 1..89: mol_type = other RNA
ctttgccaagtgttccagccaccggcccagggcaatgaacacaaagagcatggggggcgtgtcgaagaatgtcacagggctacgctccg

SEQ ID NO: 4554 - RNA, 89 nt, synthetic construct
  source 1..89: mol_type = other RNA
ctttgccaagtgttccagccaccggcccagggcaatgaacacaaagagcatggggggcgtgtcgaagaatgtcacagggctacgttccg

SEQ ID NO: 4555 - RNA, 89 nt, synthetic construct
  source 1..89: mol_type = other RNA
ctttgccaagtgttccagccaccggcccagggcaatgaacacaaagagcatggggggcgtgtcgaagaatgtcacagggctgcgctccg

SEQ ID NO: 4556 - RNA, 89 nt, synthetic construct
  source 1..89: mol_type = other RNA
ctttgccaagtgttccagccaccggcccagggcaatgaacacaaagagcatggggggcgtgtcgaagaatgtcacagggcttcgttccg

SEQ ID NO: 4557 - RNA, 89 nt, synthetic construct
  source 1..89: mol_type = other RNA
ctttgccaagtgttccagccaccggcccagggcaatgaacacaaagagcatggggggcgtgtcgaagaatgtcacagggctgcgttccg

SEQ ID NO: 4558 - RNA, 89 nt, synthetic construct
  source 1..89: mol_type = other RNA
ctttgccaagtgttccagccaccggcccagggcaatgaacacaaagagcatggggggcgtgtcgaagaatgtcacagggctccgctccg

SEQ ID NO: 4559 - RNA, 89 nt, synthetic construct
  source 1..89: mol_type = other RNA
ctttgccaagtgttccagccaccggcccagggcaatgaacacaaagagcatggggggcgtgtcgaagaatgtcacagggctccgttccg

SEQ ID NO: 4560 - RNA, 89 nt, synthetic construct
  source 1..89: mol_type = other RNA
ctttgccaagtgttccagccaccggcccagggcaatgaacacaaagagcatggggggcgtgtcgaagaatgtcacagggctcctttccg

SEQ ID NO: 4561 - RNA, 90 nt, synthetic construct
  source 1..90: mol_type = other RNA
cctttgccaagtgttccagccaccggcccagggcaatgaacacaaagagcatggggggcgtgtcgaagaatgtcacagggctacgctccg

SEQ ID NO: 4562 - RNA, 90 nt, synthetic construct
  source 1..90: mol_type = other RNA
cctttgccaagtgttccagccaccggcccagggcaatgaacacaaagagcatggggggcgtgtcgaagaatgtcacagggcttcgttccg

SEQ ID NO: 4563 - RNA, 90 nt, synthetic construct
  source 1..90: mol_type = other RNA
cctttgccaagtgttccagccaccggcccagggcaatgaacacaaagagcatggggggcgtgtcgaagaatgtcacagggctcctttccg

SEQ ID NO: 4564 - RNA, 90 nt, synthetic construct
  source 1..90: mol_type = other RNA
cctttgccaagtgttccagccaccggcccagggcaatgaacacaaagagcatggggggcgtgtcgaagaatgtcacagggctccgctccg

SEQ ID NO: 4565 - RNA, 90 nt, synthetic construct
  source 1..90: mol_type = other RNA
cctttgccaagtgttccagccaccggcccagggcaatgaacacaaagagcatggggggcgtgtcgaagaatgtcacagggctccgttccg

SEQ ID NO: 4566 - RNA, 90 nt, synthetic construct
  source 1..90: mol_type = other RNA
cctttgccaagtgttccagccaccggcccagggcaatgaacacaaagagcatggggggcgtgtcgaagaatgtcacagggctgcgttccg

SEQ ID NO: 4567 - RNA, 90 nt, synthetic construct
  source 1..90: mol_type = other RNA
cctttgccaagtgttccagccaccggcccagggcaatgaacacaaagagcatggggggcgtgtcgaagaatgtcacagggcttcgctccg

SEQ ID NO: 4568 - RNA, 90 nt, synthetic construct
  source 1..90: mol_type = other RNA
cctttgccaagtgttccagccaccggcccagggcaatgaacacaaagagcatggggggcgtgtcgaagaatgtcacagggctgcgctccg

SEQ ID NO: 4569 - RNA, 90 nt, synthetic construct
  source 1..90: mol_type = other RNA
cctttgccaagtgttccagccaccggcccagggcaatgaacacaaagagcatggggggcgtgtcgaagaatgtcacagggctcctctccg

SEQ ID NO: 4570 - RNA, 90 nt, synthetic construct
  source 1..90: mol_type = other RNA
cctttgccaagtgttccagccaccggcccagggcaatgaacacaaagagcatggggggcgtgtcgaagaatgtcacagggctacgttccg

SEQ ID NO: 4571 - RNA, 91 nt, synthetic construct
  source 1..91: mol_type = other RNA
acctttgccaagtgttccagccaccggcccagggcaatgaacacaaagagcatggggggcgtgtcgaagaatgtcacagggctgcgctccg

SEQ ID NO: 4572 - RNA, 91 nt, synthetic construct
  source 1..91: mol_type = other RNA
acctttgccaagtgttccagccaccggcccagggcaatgaacacaaagagcatggggggcgtgtcgaagaatgtcacagggctcctctccg

SEQ ID NO: 4573 - RNA, 91 nt, synthetic construct
  source 1..91: mol_type = other RNA
acctttgccaagtgttccagccaccggcccagggcaatgaacacaaagagcatggggggcgtgtcgaagaatgtcacagggctacgctccg

SEQ ID NO: 4574 - RNA, 91 nt, synthetic construct
  source 1..91: mol_type = other RNA
acctttgccaagtgttccagccaccggcccagggcaatgaacacaaagagcatggggggcgtgtcgaagaatgtcacagggctcctttccg

SEQ ID NO: 4575 - RNA, 91 nt, synthetic construct
  source 1..91: mol_type = other RNA
acctttgccaagtgttccagccaccggcccagggcaatgaacacaaagagcatggggggcgtgtcgaagaatgtcacagggcttcgttccg

SEQ ID NO: 4576 - RNA, 91 nt, synthetic construct
  source 1..91: mol_type = other RNA
acctttgccaagtgttccagccaccggcccagggcaatgaacacaaagagcatggggggcgtgtcgaagaatgtcacagggctacgttccg

SEQ ID NO: 4577 - RNA, 91 nt, synthetic construct
  source 1..91: mol_type = other RNA
acctttgccaagtgttccagccaccggcccagggcaatgaacacaaagagcatggggggcgtgtcgaagaatgtcacagggctccgttccg

SEQ ID NO: 4578 - RNA, 91 nt, synthetic construct
  source 1..91: mol_type = other RNA
acctttgccaagtgttccagccaccggcccagggcaatgaacacaaagagcatggggggcgtgtcgaagaatgtcacagggctgcgttccg

SEQ ID NO: 4579 - RNA, 91 nt, synthetic construct
  source 1..91: mol_type = other RNA
acctttgccaagtgttccagccaccggcccagggcaatgaacacaaagagcatggggggcgtgtcgaagaatgtcacagggcttcgctccg

SEQ ID NO: 4580 - RNA, 91 nt, synthetic construct
  source 1..91: mol_type = other RNA
acctttgccaagtgttccagccaccggcccagggcaatgaacacaaagagcatggggggcgtgtcgaagaatgtcacagggctccgctccg

SEQ ID NO: 4581 - RNA, 92 nt, synthetic construct
  source 1..92: mol_type = other RNA
tacctttgccaagtgttccagccaccggcccagggcaatgaacacaaagagcatggggggcgtgtcgaagaatgtcacagggctccgttccg

SEQ ID NO: 4582 - RNA, 92 nt, synthetic construct
  source 1..92: mol_type = other RNA
tacctttgccaagtgttccagccaccggcccagggcaatgaacacaaagagcatggggggcgtgtcgaagaatgtcacagggctgcgttccg

SEQ ID NO: 4583 - RNA, 92 nt, synthetic construct
  source 1..92: mol_type = other RNA
tacctttgccaagtgttccagccaccggcccagggcaatgaacacaaagagcatggggggcgtgtcgaagaatgtcacagggctccgctccg

SEQ ID NO: 4584 - RNA, 92 nt, synthetic construct
  source 1..92: mol_type = other RNA
tacctttgccaagtgttccagccaccggcccagggcaatgaacacaaagagcatggggggcgtgtcgaagaatgtcacagggctacgctccg

SEQ ID NO: 4585 - RNA, 92 nt, synthetic construct
  source 1..92: mol_type = other RNA
tacctttgccaagtgttccagccaccggcccagggcaatgaacacaaagagcatggggggcgtgtcgaagaatgtcacagggctcctctccg

SEQ ID NO: 4586 - RNA, 92 nt, synthetic construct
  source 1..92: mol_type = other RNA
tacctttgccaagtgttccagccaccggcccagggcaatgaacacaaagagcatggggggcgtgtcgaagaatgtcacagggcttcgctccg

SEQ ID NO: 4587 - RNA, 92 nt, synthetic construct
  source 1..92: mol_type = other RNA
tacctttgccaagtgttccagccaccggcccagggcaatgaacacaaagagcatggggggcgtgtcgaagaatgtcacagggctgcgctccg

SEQ ID NO: 4588 - RNA, 92 nt, synthetic construct
  source 1..92: mol_type = other RNA
tacctttgccaagtgttccagccaccggcccagggcaatgaacacaaagagcatggggggcgtgtcgaagaatgtcacagggctacgttccg

SEQ ID NO: 4589 - RNA, 92 nt, synthetic construct
  source 1..92: mol_type = other RNA
tacctttgccaagtgttccagccaccggcccagggcaatgaacacaaagagcatggggggcgtgtcgaagaatgtcacagggcttcgttccg

SEQ ID NO: 4590 - RNA, 92 nt, synthetic construct
  source 1..92: mol_type = other RNA
tacctttgccaagtgttccagccaccggcccagggcaatgaacacaaagagcatggggggcgtgtcgaagaatgtcacagggctcctttccg

SEQ ID NO: 4591 - RNA, 93 nt, synthetic construct
  source 1..93: mol_type = other RNA
ttacctttgccaagtgttccagccaccggcccagggcaatgaacacaaagagcatggggggcgtgtcgaagaatgtcacagggctgcgctccg

SEQ ID NO: 4592 - RNA, 93 nt, synthetic construct
  source 1..93: mol_type = other RNA
ttacctttgccaagtgttccagccaccggcccagggcaatgaacacaaagagcatggggggcgtgtcgaagaatgtcacagggctgcgttccg

SEQ ID NO: 4593 - RNA, 93 nt, synthetic construct
  source 1..93: mol_type = other RNA
ttacctttgccaagtgttccagccaccggcccagggcaatgaacacaaagagcatggggggcgtgtcgaagaatgtcacagggctacgttccg

SEQ ID NO: 4594 - RNA, 93 nt, synthetic construct
  source 1..93: mol_type = other RNA
ttacctttgccaagtgttccagccaccggcccagggcaatgaacacaaagagcatggggggcgtgtcgaagaatgtcacagggcttcgttccg

SEQ ID NO: 4595 - RNA, 93 nt, synthetic construct
  source 1..93: mol_type = other RNA
ttacctttgccaagtgttccagccaccggcccagggcaatgaacacaaagagcatggggggcgtgtcgaagaatgtcacagggctccgttccg

SEQ ID NO: 4596 - RNA, 93 nt, synthetic construct
  source 1..93: mol_type = other RNA
ttacctttgccaagtgttccagccaccggcccagggcaatgaacacaaagagcatggggggcgtgtcgaagaatgtcacagggcttcgctccg

SEQ ID NO: 4597 - RNA, 93 nt, synthetic construct
  source 1..93: mol_type = other RNA
ttacctttgccaagtgttccagccaccggcccagggcaatgaacacaaagagcatggggggcgtgtcgaagaatgtcacagggctccgctccg

SEQ ID NO: 4598 - RNA, 93 nt, synthetic construct
  source 1..93: mol_type = other RNA
ttacctttgccaagtgttccagccaccggcccagggcaatgaacacaaagagcatggggggcgtgtcgaagaatgtcacagggctacgctccg

SEQ ID NO: 4599 - RNA, 93 nt, synthetic construct
  source 1..93: mol_type = other RNA
ttacctttgccaagtgttccagccaccggcccagggcaatgaacacaaagagcatggggggcgtgtcgaagaatgtcacagggctcctctccg

SEQ ID NO: 4600 - RNA, 93 nt, synthetic construct
  source 1..93: mol_type = other RNA
ttacctttgccaagtgttccagccaccggcccagggcaatgaacacaaagagcatggggggcgtgtcgaagaatgtcacagggctcctttccg

SEQ ID NO: 4601 - RNA, 94 nt, synthetic construct
  source 1..94: mol_type = other RNA
gttacctttgccaagtgttccagccaccggcccagggcaatgaacacaaagagcatggggggcgtgtcgaagaatgtcacagggctcctttccg

SEQ ID NO: 4602 - RNA, 94 nt, synthetic construct
  source 1..94: mol_type = other RNA
gttacctttgccaagtgttccagccaccggcccagggcaatgaacacaaagagcatggggggcgtgtcgaagaatgtcacagggcttcgttccg

SEQ ID NO: 4603 - RNA, 94 nt, synthetic construct
  source 1..94: mol_type = other RNA
gttacctttgccaagtgttccagccaccggcccagggcaatgaacacaaagagcatggggggcgtgtcgaagaatgtcacagggcttcgctccg

SEQ ID NO: 4604 - RNA, 94 nt, synthetic construct
  source 1..94: mol_type = other RNA
gttacctttgccaagtgttccagccaccggcccagggcaatgaacacaaagagcatggggggcgtgtcgaagaatgtcacagggctcctctccg

SEQ ID NO: 4605 - RNA, 94 nt, synthetic construct
  source 1..94: mol_type = other RNA
gttacctttgccaagtgttccagccaccggcccagggcaatgaacacaaagagcatggggggcgtgtcgaagaatgtcacagggctccgctccg

SEQ ID NO: 4606 - RNA, 94 nt, synthetic construct
  source 1..94: mol_type = other RNA
gttacctttgccaagtgttccagccaccggcccagggcaatgaacacaaagagcatggggggcgtgtcgaagaatgtcacagggctacgctccg

SEQ ID NO: 4607 - RNA, 94 nt, synthetic construct
  source 1..94: mol_type = other RNA
gttacctttgccaagtgttccagccaccggcccagggcaatgaacacaaagagcatggggggcgtgtcgaagaatgtcacagggctgcgttccg

SEQ ID NO: 4608 - RNA, 94 nt, synthetic construct
  source 1..94: mol_type = other RNA
gttacctttgccaagtgttccagccaccggcccagggcaatgaacacaaagagcatggggggcgtgtcgaagaatgtcacagggctccgttccg

SEQ ID NO: 4609 - RNA, 94 nt, synthetic construct
  source 1..94: mol_type = other RNA
gttacctttgccaagtgttccagccaccggcccagggcaatgaacacaaagagcatggggggcgtgtcgaagaatgtcacagggctacgttccg

SEQ ID NO: 4610 - RNA, 94 nt, synthetic construct
  source 1..94: mol_type = other RNA
gttacctttgccaagtgttccagccaccggcccagggcaatgaacacaaagagcatggggggcgtgtcgaagaatgtcacagggctgcgctccg

SEQ ID NO: 4611 - RNA, 95 nt, synthetic construct
  source 1..95: mol_type = other RNA
tgttacctttgccaagtgttccagccaccggcccagggcaatgaacacaaagagcatggggggcgtgtcgaagaatgtcacagggctcctctccg

SEQ ID NO: 4612 - RNA, 95 nt, synthetic construct
  source 1..95: mol_type = other RNA
tgttacctttgccaagtgttccagccaccggcccagggcaatgaacacaaagagcatggggggcgtgtcgaagaatgtcacagggctacgctccg

SEQ ID NO: 4613 - RNA, 95 nt, synthetic construct
  source 1..95: mol_type = other RNA
tgttacctttgccaagtgttccagccaccggcccagggcaatgaacacaaagagcatggggggcgtgtcgaagaatgtcacagggctgcgctccg

SEQ ID NO: 4614 - RNA, 95 nt, synthetic construct
  source 1..95: mol_type = other RNA
tgttacctttgccaagtgttccagccaccggcccagggcaatgaacacaaagagcatggggggcgtgtcgaagaatgtcacagggcttcgctccg

SEQ ID NO: 4615 - RNA, 95 nt, synthetic construct
  source 1..95: mol_type = other RNA
tgttacctttgccaagtgttccagccaccggcccagggcaatgaacacaaagagcatggggggcgtgtcgaagaatgtcacagggctccgttccg

SEQ ID NO: 4616 - RNA, 95 nt, synthetic construct
  source 1..95: mol_type = other RNA
tgttacctttgccaagtgttccagccaccggcccagggcaatgaacacaaagagcatggggggcgtgtcgaagaatgtcacagggctgcgttccg

SEQ ID NO: 4617 - RNA, 95 nt, synthetic construct
  source 1..95: mol_type = other RNA
tgttacctttgccaagtgttccagccaccggcccagggcaatgaacacaaagagcatggggggcgtgtcgaagaatgtcacagggcttcgttccg

SEQ ID NO: 4618 - RNA, 95 nt, synthetic construct
  source 1..95: mol_type = other RNA
tgttacctttgccaagtgttccagccaccggcccagggcaatgaacacaaagagcatggggggcgtgtcgaagaatgtcacagggctccgctccg

SEQ ID NO: 4619 - RNA, 95 nt, synthetic construct
  source 1..95: mol_type = other RNA
tgttacctttgccaagtgttccagccaccggcccagggcaatgaacacaaagagcatggggggcgtgtcgaagaatgtcacagggctcctttccg

SEQ ID NO: 4620 - RNA, 95 nt, synthetic construct
  source 1..95: mol_type = other RNA
tgttacctttgccaagtgttccagccaccggcccagggcaatgaacacaaagagcatggggggcgtgtcgaagaatgtcacagggctacgttccg

SEQ ID NO: 4621 - RNA, 96 nt, synthetic construct
  source 1..96: mol_type = other RNA
ctgttacctttgccaagtgttccagccaccggcccagggcaatgaacacaaagagcatggggggcgtgtcgaagaatgtcacagggctccgctccg

SEQ ID NO: 4622 - RNA, 96 nt, synthetic construct
  source 1..96: mol_type = other RNA
ctgttacctttgccaagtgttccagccaccggcccagggcaatgaacacaaagagcatggggggcgtgtcgaagaatgtcacagggctcctctccg

SEQ ID NO: 4623 - RNA, 96 nt, synthetic construct
  source 1..96: mol_type = other RNA
ctgttacctttgccaagtgttccagccaccggcccagggcaatgaacacaaagagcatggggggcgtgtcgaagaatgtcacagggctccgttccg

SEQ ID NO: 4624 - RNA, 96 nt, synthetic construct
  source 1..96: mol_type = other RNA
ctgttacctttgccaagtgttccagccaccggcccagggcaatgaacacaaagagcatggggggcgtgtcgaagaatgtcacagggctgcgctccg

SEQ ID NO: 4625 - RNA, 96 nt, synthetic construct
  source 1..96: mol_type = other RNA
ctgttacctttgccaagtgttccagccaccggcccagggcaatgaacacaaagagcatggggggcgtgtcgaagaatgtcacagggctcctttccg

SEQ ID NO: 4626 - RNA, 96 nt, synthetic construct
  source 1..96: mol_type = other RNA
ctgttacctttgccaagtgttccagccaccggcccagggcaatgaacacaaagagcatggggggcgtgtcgaagaatgtcacagggcttcgctccg

SEQ ID NO: 4627 - RNA, 96 nt, synthetic construct
  source 1..96: mol_type = other RNA
ctgttacctttgccaagtgttccagccaccggcccagggcaatgaacacaaagagcatggggggcgtgtcgaagaatgtcacagggctacgctccg

SEQ ID NO: 4628 - RNA, 96 nt, synthetic construct
  source 1..96: mol_type = other RNA
ctgttacctttgccaagtgttccagccaccggcccagggcaatgaacacaaagagcatggggggcgtgtcgaagaatgtcacagggctgcgttccg

SEQ ID NO: 4629 - RNA, 96 nt, synthetic construct
  source 1..96: mol_type = other RNA
ctgttacctttgccaagtgttccagccaccggcccagggcaatgaacacaaagagcatggggggcgtgtcgaagaatgtcacagggcttcgttccg

SEQ ID NO: 4630 - RNA, 96 nt, synthetic construct
  source 1..96: mol_type = other RNA
ctgttacctttgccaagtgttccagccaccggcccagggcaatgaacacaaagagcatggggggcgtgtcgaagaatgtcacagggctacgttccg

SEQ ID NO: 4631 - RNA, 97 nt, synthetic construct
  source 1..97: mol_type = other RNA
gctgttacctttgccaagtgttccagccaccggcccagggcaatgaacacaaagagcatggggggcgtgtcgaagaatgtcacagggcttcgctccg

SEQ ID NO: 4632 - RNA, 97 nt, synthetic construct
  source 1..97: mol_type = other RNA
gctgttacctttgccaagtgttccagccaccggcccagggcaatgaacacaaagagcatggggggcgtgtcgaagaatgtcacagggctgcgttccg

SEQ ID NO: 4633 - RNA, 97 nt, synthetic construct
  source 1..97: mol_type = other RNA
gctgttacctttgccaagtgttccagccaccggcccagggcaatgaacacaaagagcatggggggcgtgtcgaagaatgtcacagggcttcgttccg

SEQ ID NO: 4634 - RNA, 97 nt, synthetic construct
  source 1..97: mol_type = other RNA
gctgttacctttgccaagtgttccagccaccggcccagggcaatgaacacaaagagcatggggggcgtgtcgaagaatgtcacagggctgcgctccg

SEQ ID NO: 4635 - RNA, 97 nt, synthetic construct
  source 1..97: mol_type = other RNA
gctgttacctttgccaagtgttccagccaccggcccagggcaatgaacacaaagagcatggggggcgtgtcgaagaatgtcacagggctccgctccg

SEQ ID NO: 4636 - RNA, 97 nt, synthetic construct
  source 1..97: mol_type = other RNA
gctgttacctttgccaagtgttccagccaccggcccagggcaatgaacacaaagagcatggggggcgtgtcgaagaatgtcacagggctcctctccg

SEQ ID NO: 4637 - RNA, 97 nt, synthetic construct
  source 1..97: mol_type = other RNA
gctgttacctttgccaagtgttccagccaccggcccagggcaatgaacacaaagagcatggggggcgtgtcgaagaatgtcacagggctccgttccg

SEQ ID NO: 4638 - RNA, 97 nt, synthetic construct
  source 1..97: mol_type = other RNA
gctgttacctttgccaagtgttccagccaccggcccagggcaatgaacacaaagagcatggggggcgtgtcgaagaatgtcacagggctacgttccg

SEQ ID NO: 4639 - RNA, 97 nt, synthetic construct
  source 1..97: mol_type = other RNA
gctgttacctttgccaagtgttccagccaccggcccagggcaatgaacacaaagagcatggggggcgtgtcgaagaatgtcacagggctacgctccg

SEQ ID NO: 4640 - RNA, 97 nt, synthetic construct
  source 1..97: mol_type = other RNA
gctgttacctttgccaagtgttccagccaccggcccagggcaatgaacacaaagagcatggggggcgtgtcgaagaatgtcacagggctcctttccg

SEQ ID NO: 4641 - RNA, 98 nt, synthetic construct
  source 1..98: mol_type = other RNA
tgctgttacctttgccaagtgttccagccaccggcccagggcaatgaacacaaagagcatggggggcgtgtcgaagaatgtcacagggctcctttccg

SEQ ID NO: 4642 - RNA, 98 nt, synthetic construct
  source 1..98: mol_type = other RNA
tgctgttacctttgccaagtgttccagccaccggcccagggcaatgaacacaaagagcatggggggcgtgtcgaagaatgtcacagggctcctctccg

SEQ ID NO: 4643 - RNA, 98 nt, synthetic construct
  source 1..98: mol_type = other RNA
tgctgttacctttgccaagtgttccagccaccggcccagggcaatgaacacaaagagcatggggggcgtgtcgaagaatgtcacagggctccgctccg

SEQ ID NO: 4644 - RNA, 98 nt, synthetic construct
  source 1..98: mol_type = other RNA
tgctgttacctttgccaagtgttccagccaccggcccagggcaatgaacacaaagagcatggggggcgtgtcgaagaatgtcacagggctccgttccg

SEQ ID NO: 4645 - RNA, 98 nt, synthetic construct
  source 1..98: mol_type = other RNA
tgctgttacctttgccaagtgttccagccaccggcccagggcaatgaacacaaagagcatggggggcgtgtcgaagaatgtcacagggcttcgctccg

SEQ ID NO: 4646 - RNA, 98 nt, synthetic construct
  source 1..98: mol_type = other RNA
tgctgttacctttgccaagtgttccagccaccggcccagggcaatgaacacaaagagcatggggggcgtgtcgaagaatgtcacagggctacgttccg

SEQ ID NO: 4647 - RNA, 98 nt, synthetic construct
  source 1..98: mol_type = other RNA
tgctgttacctttgccaagtgttccagccaccggcccagggcaatgaacacaaagagcatggggggcgtgtcgaagaatgtcacagggcttcgttccg

SEQ ID NO: 4648 - RNA, 98 nt, synthetic construct
  source 1..98: mol_type = other RNA
tgctgttacctttgccaagtgttccagccaccggcccagggcaatgaacacaaagagcatggggggcgtgtcgaagaatgtcacagggctgcgttccg

SEQ ID NO: 4649 - RNA, 98 nt, synthetic construct
  source 1..98: mol_type = other RNA
tgctgttacctttgccaagtgttccagccaccggcccagggcaatgaacacaaagagcatggggggcgtgtcgaagaatgtcacagggctgcgctccg

SEQ ID NO: 4650 - RNA, 98 nt, synthetic construct
  source 1..98: mol_type = other RNA
tgctgttacctttgccaagtgttccagccaccggcccagggcaatgaacacaaagagcatggggggcgtgtcgaagaatgtcacagggctacgctccg

SEQ ID NO: 4651 - RNA, 99 nt, synthetic construct
  source 1..99: mol_type = other RNA
ctgctgttacctttgccaagtgttccagccaccggcccagggcaatgaacacaaagagcatggggggcgtgtcgaagaatgtcacagggctcctttccg

SEQ ID NO: 4652 - RNA, 99 nt, synthetic construct
  source 1..99: mol_type = other RNA
ctgctgttacctttgccaagtgttccagccaccggcccagggcaatgaacacaaagagcatggggggcgtgtcgaagaatgtcacagggcttcgctccg

SEQ ID NO: 4653 - RNA, 99 nt, synthetic construct
  source 1..99: mol_type = other RNA
ctgctgttacctttgccaagtgttccagccaccggcccagggcaatgaacacaaagagcatggggggcgtgtcgaagaatgtcacagggctccgctccg

SEQ ID NO: 4654 - RNA, 99 nt, synthetic construct
  source 1..99: mol_type = other RNA
ctgctgttacctttgccaagtgttccagccaccggcccagggcaatgaacacaaagagcatggggggcgtgtcgaagaatgtcacagggctgcgctccg

SEQ ID NO: 4655 - RNA, 99 nt, synthetic construct
  source 1..99: mol_type = other RNA
ctgctgttacctttgccaagtgttccagccaccggcccagggcaatgaacacaaagagcatggggggcgtgtcgaagaatgtcacagggctccgttccg

SEQ ID NO: 4656 - RNA, 99 nt, synthetic construct
  source 1..99: mol_type = other RNA
ctgctgttacctttgccaagtgttccagccaccggcccagggcaatgaacacaaagagcatggggggcgtgtcgaagaatgtcacagggctacgctccg

SEQ ID NO: 4657 - RNA, 99 nt, synthetic construct
  source 1..99: mol_type = other RNA
ctgctgttacctttgccaagtgttccagccaccggcccagggcaatgaacacaaagagcatggggggcgtgtcgaagaatgtcacagggctcctctccg

SEQ ID NO: 4658 - RNA, 99 nt, synthetic construct
  source 1..99: mol_type = other RNA
ctgctgttacctttgccaagtgttccagccaccggcccagggcaatgaacacaaagagcatggggggcgtgtcgaagaatgtcacagggcttcgttccg

SEQ ID NO: 4659 - RNA, 99 nt, synthetic construct
  source 1..99: mol_type = other RNA
ctgctgttacctttgccaagtgttccagccaccggcccagggcaatgaacacaaagagcatggggggcgtgtcgaagaatgtcacagggctacgttccg

SEQ ID NO: 4660 - RNA, 99 nt, synthetic construct
  source 1..99: mol_type = other RNA
ctgctgttacctttgccaagtgttccagccaccggcccagggcaatgaacacaaagagcatggggggcgtgtcgaagaatgtcacagggctgcgttccg

SEQ ID NO: 4661 - RNA, 100 nt, synthetic construct
  source 1..100: mol_type = other RNA
gctgctgttacctttgccaagtgttccagccaccggcccagggcaatgaacacaaagagcatggggggcgtgtcgaagaatgtcacagggctgcgttccg

SEQ ID NO: 4662 - RNA, 100 nt, synthetic construct
  source 1..100: mol_type = other RNA
gctgctgttacctttgccaagtgttccagccaccggcccagggcaatgaacacaaagagcatggggggcgtgtcgaagaatgtcacagggctcctctccg

SEQ ID NO: 4663 - RNA, 100 nt, synthetic construct
  source 1..100: mol_type = other RNA
gctgctgttacctttgccaagtgttccagccaccggcccagggcaatgaacacaaagagcatggggggcgtgtcgaagaatgtcacagggctacgctccg

SEQ ID NO: 4664 - RNA, 100 nt, synthetic construct
  source 1..100: mol_type = other RNA
gctgctgttacctttgccaagtgttccagccaccggcccagggcaatgaacacaaagagcatggggggcgtgtcgaagaatgtcacagggctccgctccg

SEQ ID NO: 4665 - RNA, 100 nt, synthetic construct
  source 1..100: mol_type = other RNA
gctgctgttacctttgccaagtgttccagccaccggcccagggcaatgaacacaaagagcatggggggcgtgtcgaagaatgtcacagggcttcgttccg

SEQ ID NO: 4666 - RNA, 100 nt, synthetic construct
  source 1..100: mol_type = other RNA
gctgctgttacctttgccaagtgttccagccaccggcccagggcaatgaacacaaagagcatggggggcgtgtcgaagaatgtcacagggcttcgctccg

SEQ ID NO: 4667 - RNA, 100 nt, synthetic construct
  source 1..100: mol_type = other RNA
gctgctgttacctttgccaagtgttccagccaccggcccagggcaatgaacacaaagagcatggggggcgtgtcgaagaatgtcacagggctcctttccg

SEQ ID NO: 4668 - RNA, 100 nt, synthetic construct
  source 1..100: mol_type = other RNA
gctgctgttacctttgccaagtgttccagccaccggcccagggcaatgaacacaaagagcatggggggcgtgtcgaagaatgtcacagggctgcgctccg

SEQ ID NO: 4669 - RNA, 100 nt, synthetic construct
  source 1..100: mol_type = other RNA
gctgctgttacctttgccaagtgttccagccaccggcccagggcaatgaacacaaagagcatggggggcgtgtcgaagaatgtcacagggctacgttccg

SEQ ID NO: 4670 - RNA, 100 nt, synthetic construct
  source 1..100: mol_type = other RNA
gctgctgttacctttgccaagtgttccagccaccggcccagggcaatgaacacaaagagcatggggggcgtgtcgaagaatgtcacagggctccgttccg

SEQ ID NO: 4671 - RNA, 20 nt, synthetic construct
  source 1..20: mol_type = other RNA
aatgtcacagggctcctttc

SEQ ID NO: 4672 - RNA, 16 nt, synthetic construct
  source 1..16: mol_type = other RNA
gctgagaaggcggaga

SEQ ID NO: 4673 - RNA, 17 nt, synthetic construct
  source 1..17: mol_type = other RNA
ggctgagaaggcggaga

SEQ ID NO: 4674 - RNA, 18 nt, synthetic construct
  source 1..18: mol_type = other RNA
tggctgagaaggcggaga

SEQ ID NO: 4675 - RNA, 19 nt, synthetic construct
  source 1..19: mol_type = other RNA
gtggctgagaaggcggaga

SEQ ID NO: 4676 - RNA, 20 nt, synthetic construct
  source 1..20: mol_type = other RNA
tgtggctgagaaggcggaga

SEQ ID NO: 4677 - RNA, 21 nt, synthetic construct
  source 1..21: mol_type = other RNA
ctgtggctgagaaggcggaga

SEQ ID NO: 4678 - RNA, 22 nt, synthetic construct
  source 1..22: mol_type = other RNA
gctgtggctgagaaggcggaga

SEQ ID NO: 4679-4685 - skipped (7 entries)

SEQ ID NO: 4686 - RNA, 10 nt, synthetic construct
  source 1..10: mol_type = other RNA
ccgccttctc

SEQ ID NO: 4687 - RNA, 11 nt, synthetic construct
  source 1..11: mol_type = other RNA
ccgccttctca

SEQ ID NO: 4688 - RNA, 12 nt, synthetic construct
  source 1..12: mol_type = other RNA
ccgccttctcag

SEQ ID NO: 4689 - RNA, 13 nt, synthetic construct
  source 1..13: mol_type = other RNA
ccgccttctcagc

SEQ ID NO: 4690 - RNA, 14 nt, synthetic construct
  source 1..14: mol_type = other RNA
ccgccttctcagcc

SEQ ID NO: 4691 - RNA, 15 nt, synthetic construct
  source 1..15: mol_type = other RNA
ccgccttctcagcca

SEQ ID NO: 4692 - RNA, 16 nt, synthetic construct
  source 1..16: mol_type = other RNA
ccgccttctcagccac

SEQ ID NO: 4693 - RNA, 17 nt, synthetic construct
  source 1..17: mol_type = other RNA
ccgccttctcagccaca

SEQ ID NO: 4694 - RNA, 18 nt, synthetic construct
  source 1..18: mol_type = other RNA
ccgccttctcagccacag

SEQ ID NO: 4695 - RNA, 19 nt, synthetic construct
  source 1..19: mol_type = other RNA
ccgccttctcagccacagc

SEQ ID NO: 4696 - RNA, 64 nt, synthetic construct
  source 1..64: mol_type = other RNA
cggcccagggcaatgaacacaaagagcatggggggcgtgtcgaagaatgtcacaggggatcgct

SEQ ID NO: 4697 - RNA, 64 nt, synthetic construct
  source 1..64: mol_type = other RNA
cggcccagggcaatgaacacaaagagcatggggggcgtgtcgaagaatgtcacaggcgagcgct

SEQ ID NO: 4698 - RNA, 64 nt, synthetic construct
  source 1..64: mol_type = other RNA
cggcccagggcaatgaacacaaagagcatggggggcgtgtcgaagaatgtcacagggctcctct

SEQ ID NO: 4699 - RNA, 64 nt, synthetic construct
  source 1..64: mol_type = other RNA
cggcccagggcaatgaacacaaagagcatggggggcgtgtcgaagaatgtcacagggctacgct

SEQ ID NO: 4700 - RNA, 64 nt, synthetic construct
  source 1..64: mol_type = other RNA
cggcccagggcaatgaacacaaagagcatggggggcgtgtcgaagaatgtcacaggcgatcgct

SEQ ID NO: 4701 - RNA, 64 nt, synthetic construct
  source 1..64: mol_type = other RNA
cggcccagggcaatgaacacaaagagcatggggggcgtgtcgaagaatgtcacaggagatctct

SEQ ID NO: 4702 - RNA, 64 nt, synthetic construct
  source 1..64: mol_type = other RNA
cggcccagggcaatgaacacaaagagcatggggggcgtgtcgaagaatgtcacaggtgagcgct

SEQ ID NO: 4703 - RNA, 64 nt, synthetic construct
  source 1..64: mol_type = other RNA
cggcccagggcaatgaacacaaagagcatggggggcgtgtcgaagaatgtcacaggtgatctct

SEQ ID NO: 4704 - RNA, 64 nt, synthetic construct
  source 1..64: mol_type = other RNA
cggcccagggcaatgaacacaaagagcatggggggcgtgtcgaagaatgtcacaggcgaacgct

SEQ ID NO: 4705 - RNA, 64 nt, synthetic construct
  source 1..64: mol_type = other RNA
cggcccagggcaatgaacacaaagagcatggggggcgtgtcgaagaatgtcacaggggacctct

SEQ ID NO: 4706 - RNA, 64 nt, synthetic construct
  source 1..64: mol_type = other RNA
cggcccagggcaatgaacacaaagagcatggggggcgtgtcgaagaatgtcacaggcgacctct

SEQ ID NO: 4707 - RNA, 64 nt, synthetic construct
  source 1..64: mol_type = other RNA
cggcccagggcaatgaacacaaagagcatggggggcgtgtcgaagaatgtcacaggtgatcgct

SEQ ID NO: 4708 - RNA, 64 nt, synthetic construct
  source 1..64: mol_type = other RNA
cggcccagggcaatgaacacaaagagcatggggggcgtgtcgaagaatgtcacaggagagcgct

SEQ ID NO: 4709 - RNA, 64 nt, synthetic construct
  source 1..64: mol_type = other RNA
cggcccagggcaatgaacacaaagagcatggggggcgtgtcgaagaatgtcacaggagaacgct

SEQ ID NO: 4710 - RNA, 64 nt, synthetic construct
  source 1..64: mol_type = other RNA
cggcccagggcaatgaacacaaagagcatggggggcgtgtcgaagaatgtcacaggggagcgct

SEQ ID NO: 4711 - RNA, 64 nt, synthetic construct
  source 1..64: mol_type = other RNA
cggcccagggcaatgaacacaaagagcatggggggcgtgtcgaagaatgtcacaggagacctct

SEQ ID NO: 4712 - RNA, 64 nt, synthetic construct
  source 1..64: mol_type = other RNA
cggcccagggcaatgaacacaaagagcatggggggcgtgtcgaagaatgtcacagggctgcgct

SEQ ID NO: 4713 - RNA, 64 nt, synthetic construct
  source 1..64: mol_type = other RNA
cggcccagggcaatgaacacaaagagcatggggggcgtgtcgaagaatgtcacaggcgatctct

SEQ ID NO: 4714 - RNA, 64 nt, synthetic construct
  source 1..64: mol_type = other RNA
cggcccagggcaatgaacacaaagagcatggggggcgtgtcgaagaatgtcacaggggaacgct

SEQ ID NO: 4715 - RNA, 64 nt, synthetic construct
  source 1..64: mol_type = other RNA
cggcccagggcaatgaacacaaagagcatggggggcgtgtcgaagaatgtcacagggcttctct

SEQ ID NO: 4716 - RNA, 64 nt, synthetic construct
  source 1..64: mol_type = other RNA
cggcccagggcaatgaacacaaagagcatggggggcgtgtcgaagaatgtcacaggtgacctct

SEQ ID NO: 4717 - RNA, 64 nt, synthetic construct
  source 1..64: mol_type = other RNA
cggcccagggcaatgaacacaaagagcatggggggcgtgtcgaagaatgtcacaggggatctct

SEQ ID NO: 4718 - RNA, 64 nt, synthetic construct
  source 1..64: mol_type = other RNA
cggcccagggcaatgaacacaaagagcatggggggcgtgtcgaagaatgtcacaggagatcgct

SEQ ID NO: 4719 - RNA, 64 nt, synthetic construct
  source 1..64: mol_type = other RNA
cggcccagggcaatgaacacaaagagcatggggggcgtgtcgaagaatgtcacagggcttcgct

SEQ ID NO: 4720 - RNA, 64 nt, synthetic construct
  source 1..64: mol_type = other RNA
cggcccagggcaatgaacacaaagagcatggggggcgtgtcgaagaatgtcacaggtgaacgct

SEQ ID NO: 4721 - RNA, 65 nt, synthetic construct
  source 1..65: mol_type = other RNA
ccggcccagggcaatgaacacaaagagcatggggggcgtgtcgaagaatgtcacaggggatctct

SEQ ID NO: 4722 - RNA, 65 nt, synthetic construct
  source 1..65: mol_type = other RNA
ccggcccagggcaatgaacacaaagagcatggggggcgtgtcgaagaatgtcacaggcgacctct

SEQ ID NO: 4723 - RNA, 65 nt, synthetic construct
  source 1..65: mol_type = other RNA
ccggcccagggcaatgaacacaaagagcatggggggcgtgtcgaagaatgtcacaggtgagcgct

SEQ ID NO: 4724 - RNA, 65 nt, synthetic construct
  source 1..65: mol_type = other RNA
ccggcccagggcaatgaacacaaagagcatggggggcgtgtcgaagaatgtcacaggggaacgct

SEQ ID NO: 4725 - RNA, 65 nt, synthetic construct
  source 1..65: mol_type = other RNA
ccggcccagggcaatgaacacaaagagcatggggggcgtgtcgaagaatgtcacaggagatcgct

SEQ ID NO: 4726 - RNA, 65 nt, synthetic construct
  source 1..65: mol_type = other RNA
ccggcccagggcaatgaacacaaagagcatggggggcgtgtcgaagaatgtcacaggtgatctct

SEQ ID NO: 4727 - RNA, 65 nt, synthetic construct
  source 1..65: mol_type = other RNA
ccggcccagggcaatgaacacaaagagcatggggggcgtgtcgaagaatgtcacagggctacgct

SEQ ID NO: 4728 - RNA, 65 nt, synthetic construct
  source 1..65: mol_type = other RNA
ccggcccagggcaatgaacacaaagagcatggggggcgtgtcgaagaatgtcacagggctcctct

SEQ ID NO: 4729 - RNA, 65 nt, synthetic construct
  source 1..65: mol_type = other RNA
ccggcccagggcaatgaacacaaagagcatggggggcgtgtcgaagaatgtcacaggtgacctct

SEQ ID NO: 4730 - RNA, 65 nt, synthetic construct
  source 1..65: mol_type = other RNA
ccggcccagggcaatgaacacaaagagcatggggggcgtgtcgaagaatgtcacaggggagcgct

SEQ ID NO: 4731 - RNA, 65 nt, synthetic construct
  source 1..65: mol_type = other RNA
ccggcccagggcaatgaacacaaagagcatggggggcgtgtcgaagaatgtcacaggcgatcgct

SEQ ID NO: 4732 - RNA, 65 nt, synthetic construct
  source 1..65: mol_type = other RNA
ccggcccagggcaatgaacacaaagagcatggggggcgtgtcgaagaatgtcacaggtgatcgct

SEQ ID NO: 4733 - RNA, 65 nt, synthetic construct
  source 1..65: mol_type = other RNA
ccggcccagggcaatgaacacaaagagcatggggggcgtgtcgaagaatgtcacaggggacctct

SEQ ID NO: 4734 - RNA, 65 nt, synthetic construct
  source 1..65: mol_type = other RNA
ccggcccagggcaatgaacacaaagagcatggggggcgtgtcgaagaatgtcacaggagacctct

SEQ ID NO: 4735 - RNA, 65 nt, synthetic construct
  source 1..65: mol_type = other RNA
ccggcccagggcaatgaacacaaagagcatggggggcgtgtcgaagaatgtcacagggcttctct

SEQ ID NO: 4736 - RNA, 65 nt, synthetic construct
  source 1..65: mol_type = other RNA
ccggcccagggcaatgaacacaaagagcatggggggcgtgtcgaagaatgtcacaggcgagcgct

SEQ ID NO: 4737 - RNA, 65 nt, synthetic construct
  source 1..65: mol_type = other RNA
ccggcccagggcaatgaacacaaagagcatggggggcgtgtcgaagaatgtcacaggcgaacgct

SEQ ID NO: 4738 - RNA, 65 nt, synthetic construct
  source 1..65: mol_type = other RNA
ccggcccagggcaatgaacacaaagagcatggggggcgtgtcgaagaatgtcacaggcgatctct

SEQ ID NO: 4739 - RNA, 65 nt, synthetic construct
  source 1..65: mol_type = other RNA
ccggcccagggcaatgaacacaaagagcatggggggcgtgtcgaagaatgtcacaggagaacgct

SEQ ID NO: 4740 - RNA, 65 nt, synthetic construct
  source 1..65: mol_type = other RNA
ccggcccagggcaatgaacacaaagagcatggggggcgtgtcgaagaatgtcacaggagatctct

SEQ ID NO: 4741 - RNA, 65 nt, synthetic construct
  source 1..65: mol_type = other RNA
ccggcccagggcaatgaacacaaagagcatggggggcgtgtcgaagaatgtcacaggtgaacgct

SEQ ID NO: 4742 - RNA, 65 nt, synthetic construct
  source 1..65: mol_type = other RNA
ccggcccagggcaatgaacacaaagagcatggggggcgtgtcgaagaatgtcacagggctgcgct

SEQ ID NO: 4743 - RNA, 65 nt, synthetic construct
  source 1..65: mol_type = other RNA
ccggcccagggcaatgaacacaaagagcatggggggcgtgtcgaagaatgtcacaggggatcgct

SEQ ID NO: 4744 - RNA, 65 nt, synthetic construct
  source 1..65: mol_type = other RNA
ccggcccagggcaatgaacacaaagagcatggggggcgtgtcgaagaatgtcacaggagagcgct

SEQ ID NO: 4745 - RNA, 65 nt, synthetic construct
  source 1..65: mol_type = other RNA
ccggcccagggcaatgaacacaaagagcatggggggcgtgtcgaagaatgtcacagggcttcgct

SEQ ID NO: 4746 - RNA, 66 nt, synthetic construct
  source 1..66: mol_type = other RNA
accggcccagggcaatgaacacaaagagcatggggggcgtgtcgaagaatgtcacaggtgagcgct

SEQ ID NO: 4747 - RNA, 66 nt, synthetic construct
  source 1..66: mol_type = other RNA
accggcccagggcaatgaacacaaagagcatggggggcgtgtcgaagaatgtcacaggagacctct

SEQ ID NO: 4748 - RNA, 66 nt, synthetic construct
  source 1..66: mol_type = other RNA
accggcccagggcaatgaacacaaagagcatggggggcgtgtcgaagaatgtcacaggtgacctct

SEQ ID NO: 4749 - RNA, 66 nt, synthetic construct
  source 1..66: mol_type = other RNA
accggcccagggcaatgaacacaaagagcatggggggcgtgtcgaagaatgtcacaggcgatcgct

SEQ ID NO: 4750 - RNA, 66 nt, synthetic construct
  source 1..66: mol_type = other RNA
accggcccagggcaatgaacacaaagagcatggggggcgtgtcgaagaatgtcacaggagatcgct

SEQ ID NO: 4751 - RNA, 66 nt, synthetic construct
  source 1..66: mol_type = other RNA
accggcccagggcaatgaacacaaagagcatggggggcgtgtcgaagaatgtcacaggcgaacgct

SEQ ID NO: 4752 - RNA, 66 nt, synthetic construct
  source 1..66: mol_type = other RNA
accggcccagggcaatgaacacaaagagcatggggggcgtgtcgaagaatgtcacaggcgacctct

SEQ ID NO: 4753 - RNA, 66 nt, synthetic construct
  source 1..66: mol_type = other RNA
accggcccagggcaatgaacacaaagagcatggggggcgtgtcgaagaatgtcacaggggaacgct

SEQ ID NO: 4754 - RNA, 66 nt, synthetic construct
  source 1..66: mol_type = other RNA
accggcccagggcaatgaacacaaagagcatggggggcgtgtcgaagaatgtcacagggcttctct

SEQ ID NO: 4755 - RNA, 66 nt, synthetic construct
  source 1..66: mol_type = other RNA
accggcccagggcaatgaacacaaagagcatggggggcgtgtcgaagaatgtcacagggctacgct

SEQ ID NO: 4756 - RNA, 66 nt, synthetic construct
  source 1..66: mol_type = other RNA
accggcccagggcaatgaacacaaagagcatggggggcgtgtcgaagaatgtcacaggggagcgct

SEQ ID NO: 4757 - RNA, 66 nt, synthetic construct
  source 1..66: mol_type = other RNA
accggcccagggcaatgaacacaaagagcatggggggcgtgtcgaagaatgtcacaggcgagcgct

SEQ ID NO: 4758 - RNA, 66 nt, synthetic construct
  source 1..66: mol_type = other RNA
accggcccagggcaatgaacacaaagagcatggggggcgtgtcgaagaatgtcacaggtgaacgct

SEQ ID NO: 4759 - RNA, 66 nt, synthetic construct
  source 1..66: mol_type = other RNA
accggcccagggcaatgaacacaaagagcatggggggcgtgtcgaagaatgtcacaggcgatctct

SEQ ID NO: 4760 - RNA, 66 nt, synthetic construct
  source 1..66: mol_type = other RNA
accggcccagggcaatgaacacaaagagcatggggggcgtgtcgaagaatgtcacaggtgatctct

SEQ ID NO: 4761 - RNA, 66 nt, synthetic construct
  source 1..66: mol_type = other RNA
accggcccagggcaatgaacacaaagagcatggggggcgtgtcgaagaatgtcacaggtgatcgct

SEQ ID NO: 4762 - RNA, 66 nt, synthetic construct
  source 1..66: mol_type = other RNA
accggcccagggcaatgaacacaaagagcatggggggcgtgtcgaagaatgtcacagggctcctct

SEQ ID NO: 4763 - RNA, 66 nt, synthetic construct
  source 1..66: mol_type = other RNA
accggcccagggcaatgaacacaaagagcatggggggcgtgtcgaagaatgtcacaggagaacgct

SEQ ID NO: 4764 - RNA, 66 nt, synthetic construct
  source 1..66: mol_type = other RNA
accggcccagggcaatgaacacaaagagcatggggggcgtgtcgaagaatgtcacaggagagcgct

SEQ ID NO: 4765 - RNA, 66 nt, synthetic construct
  source 1..66: mol_type = other RNA
accggcccagggcaatgaacacaaagagcatggggggcgtgtcgaagaatgtcacagggcttcgct

SEQ ID NO: 4766 - RNA, 66 nt, synthetic construct
  source 1..66: mol_type = other RNA
accggcccagggcaatgaacacaaagagcatggggggcgtgtcgaagaatgtcacagggctgcgct

SEQ ID NO: 4767 - RNA, 66 nt, synthetic construct
  source 1..66: mol_type = other RNA
accggcccagggcaatgaacacaaagagcatggggggcgtgtcgaagaatgtcacaggggatcgct

SEQ ID NO: 4768 - RNA, 66 nt, synthetic construct
  source 1..66: mol_type = other RNA
accggcccagggcaatgaacacaaagagcatggggggcgtgtcgaagaatgtcacaggggatctct

SEQ ID NO: 4769 - RNA, 66 nt, synthetic construct
  source 1..66: mol_type = other RNA
accggcccagggcaatgaacacaaagagcatggggggcgtgtcgaagaatgtcacaggggacctct

SEQ ID NO: 4770 - RNA, 66 nt, synthetic construct
  source 1..66: mol_type = other RNA
accggcccagggcaatgaacacaaagagcatggggggcgtgtcgaagaatgtcacaggagatctct

SEQ ID NO: 4771 - RNA, 67 nt, synthetic construct
  source 1..67: mol_type = other RNA
caccggcccagggcaatgaacacaaagagcatggggggcgtgtcgaagaatgtcacaggggaacgct

SEQ ID NO: 4772 - RNA, 67 nt, synthetic construct
  source 1..67: mol_type = other RNA
caccggcccagggcaatgaacacaaagagcatggggggcgtgtcgaagaatgtcacaggggacctct

SEQ ID NO: 4773 - RNA, 67 nt, synthetic construct
  source 1..67: mol_type = other RNA
caccggcccagggcaatgaacacaaagagcatggggggcgtgtcgaagaatgtcacaggtgagcgct

SEQ ID NO: 4774 - RNA, 67 nt, synthetic construct
  source 1..67: mol_type = other RNA
caccggcccagggcaatgaacacaaagagcatggggggcgtgtcgaagaatgtcacaggcgatcgct

SEQ ID NO: 4775 - RNA, 67 nt, synthetic construct
  source 1..67: mol_type = other RNA
caccggcccagggcaatgaacacaaagagcatggggggcgtgtcgaagaatgtcacagggctcctct

SEQ ID NO: 4776 - RNA, 67 nt, synthetic construct
  source 1..67: mol_type = other RNA
caccggcccagggcaatgaacacaaagagcatggggggcgtgtcgaagaatgtcacagggctacgct

SEQ ID NO: 4777 - RNA, 67 nt, synthetic construct
  source 1..67: mol_type = other RNA
caccggcccagggcaatgaacacaaagagcatggggggcgtgtcgaagaatgtcacaggtgatcgct

SEQ ID NO: 4778 - RNA, 67 nt, synthetic construct
  source 1..67: mol_type = other RNA
caccggcccagggcaatgaacacaaagagcatggggggcgtgtcgaagaatgtcacaggagatctct

SEQ ID NO: 4779 - RNA, 67 nt, synthetic construct
  source 1..67: mol_type = other RNA
caccggcccagggcaatgaacacaaagagcatggggggcgtgtcgaagaatgtcacaggcgatctct

SEQ ID NO: 4780 - RNA, 67 nt, synthetic construct
  source 1..67: mol_type = other RNA
caccggcccagggcaatgaacacaaagagcatggggggcgtgtcgaagaatgtcacaggtgaacgct

SEQ ID NO: 4781 - RNA, 67 nt, synthetic construct
  source 1..67: mol_type = other RNA
caccggcccagggcaatgaacacaaagagcatggggggcgtgtcgaagaatgtcacaggcgaacgct

SEQ ID NO: 4782 - RNA, 67 nt, synthetic construct
  source 1..67: mol_type = other RNA
caccggcccagggcaatgaacacaaagagcatggggggcgtgtcgaagaatgtcacagggcttctct

SEQ ID NO: 4783 - RNA, 67 nt, synthetic construct
  source 1..67: mol_type = other RNA
caccggcccagggcaatgaacacaaagagcatggggggcgtgtcgaagaatgtcacagggcttcgct

SEQ ID NO: 4784 - RNA, 67 nt, synthetic construct
  source 1..67: mol_type = other RNA
caccggcccagggcaatgaacacaaagagcatggggggcgtgtcgaagaatgtcacaggagatcgct

SEQ ID NO: 4785 - RNA, 67 nt, synthetic construct
  source 1..67: mol_type = other RNA
caccggcccagggcaatgaacacaaagagcatggggggcgtgtcgaagaatgtcacaggtgatctct

SEQ ID NO: 4786 - RNA, 67 nt, synthetic construct
  source 1..67: mol_type = other RNA
caccggcccagggcaatgaacacaaagagcatggggggcgtgtcgaagaatgtcacaggagagcgct

SEQ ID NO: 4787 - RNA, 67 nt, synthetic construct
  source 1..67: mol_type = other RNA
caccggcccagggcaatgaacacaaagagcatggggggcgtgtcgaagaatgtcacaggagaacgct

SEQ ID NO: 4788 - RNA, 67 nt, synthetic construct
  source 1..67: mol_type = other RNA
caccggcccagggcaatgaacacaaagagcatggggggcgtgtcgaagaatgtcacagggctgcgct

SEQ ID NO: 4789 - RNA, 67 nt, synthetic construct
  source 1..67: mol_type = other RNA
caccggcccagggcaatgaacacaaagagcatggggggcgtgtcgaagaatgtcacaggcgagcgct

SEQ ID NO: 4790 - RNA, 67 nt, synthetic construct
  source 1..67: mol_type = other RNA
caccggcccagggcaatgaacacaaagagcatggggggcgtgtcgaagaatgtcacaggggatcgct

SEQ ID NO: 4791 - RNA, 67 nt, synthetic construct
  source 1..67: mol_type = other RNA
caccggcccagggcaatgaacacaaagagcatggggggcgtgtcgaagaatgtcacaggtgacctct

SEQ ID NO: 4792 - RNA, 67 nt, synthetic construct
  source 1..67: mol_type = other RNA
caccggcccagggcaatgaacacaaagagcatggggggcgtgtcgaagaatgtcacaggcgacctct

SEQ ID NO: 4793 - RNA, 67 nt, synthetic construct
  source 1..67: mol_type = other RNA
caccggcccagggcaatgaacacaaagagcatggggggcgtgtcgaagaatgtcacaggggatctct

SEQ ID NO: 4794 - RNA, 67 nt, synthetic construct
  source 1..67: mol_type = other RNA
caccggcccagggcaatgaacacaaagagcatggggggcgtgtcgaagaatgtcacaggagacctct

SEQ ID NO: 4795 - RNA, 67 nt, synthetic construct
  source 1..67: mol_type = other RNA
caccggcccagggcaatgaacacaaagagcatggggggcgtgtcgaagaatgtcacaggggagcgct

SEQ ID NO: 4796 - RNA, 68 nt, synthetic construct
  source 1..68: mol_type = other RNA
ccaccggcccagggcaatgaacacaaagagcatggggggcgtgtcgaagaatgtcacaggtgatcgct

SEQ ID NO: 4797 - RNA, 68 nt, synthetic construct
  source 1..68: mol_type = other RNA
ccaccggcccagggcaatgaacacaaagagcatggggggcgtgtcgaagaatgtcacagggcttctct

SEQ ID NO: 4798 - RNA, 68 nt, synthetic construct
  source 1..68: mol_type = other RNA
ccaccggcccagggcaatgaacacaaagagcatggggggcgtgtcgaagaatgtcacaggcgagcgct

SEQ ID NO: 4799 - RNA, 68 nt, synthetic construct
  source 1..68: mol_type = other RNA
ccaccggcccagggcaatgaacacaaagagcatggggggcgtgtcgaagaatgtcacagggctcctct

SEQ ID NO: 4800 - RNA, 68 nt, synthetic construct
  source 1..68: mol_type = other RNA
ccaccggcccagggcaatgaacacaaagagcatggggggcgtgtcgaagaatgtcacaggcgatctct

SEQ ID NO: 4801 - RNA, 68 nt, synthetic construct
  source 1..68: mol_type = other RNA
ccaccggcccagggcaatgaacacaaagagcatggggggcgtgtcgaagaatgtcacaggagatctct

SEQ ID NO: 4802 - RNA, 68 nt, synthetic construct
  source 1..68: mol_type = other RNA
ccaccggcccagggcaatgaacacaaagagcatggggggcgtgtcgaagaatgtcacaggcgatcgct

SEQ ID NO: 4803 - RNA, 68 nt, synthetic construct
  source 1..68: mol_type = other RNA
ccaccggcccagggcaatgaacacaaagagcatggggggcgtgtcgaagaatgtcacaggtgacctct

SEQ ID NO: 4804 - RNA, 68 nt, synthetic construct
  source 1..68: mol_type = other RNA
ccaccggcccagggcaatgaacacaaagagcatggggggcgtgtcgaagaatgtcacaggtgatctct

SEQ ID NO: 4805 - RNA, 68 nt, synthetic construct
  source 1..68: mol_type = other RNA
ccaccggcccagggcaatgaacacaaagagcatggggggcgtgtcgaagaatgtcacaggcgaacgct

SEQ ID NO: 4806 - RNA, 68 nt, synthetic construct
  source 1..68: mol_type = other RNA
ccaccggcccagggcaatgaacacaaagagcatggggggcgtgtcgaagaatgtcacaggtgaacgct

SEQ ID NO: 4807 - RNA, 68 nt, synthetic construct
  source 1..68: mol_type = other RNA
ccaccggcccagggcaatgaacacaaagagcatggggggcgtgtcgaagaatgtcacaggggacctct

SEQ ID NO: 4808 - RNA, 68 nt, synthetic construct
  source 1..68: mol_type = other RNA
ccaccggcccagggcaatgaacacaaagagcatggggggcgtgtcgaagaatgtcacaggtgagcgct

SEQ ID NO: 4809 - RNA, 68 nt, synthetic construct
  source 1..68: mol_type = other RNA
ccaccggcccagggcaatgaacacaaagagcatggggggcgtgtcgaagaatgtcacaggagagcgct

SEQ ID NO: 4810 - RNA, 68 nt, synthetic construct
  source 1..68: mol_type = other RNA
ccaccggcccagggcaatgaacacaaagagcatggggggcgtgtcgaagaatgtcacaggggatcgct

SEQ ID NO: 4811 - RNA, 68 nt, synthetic construct
  source 1..68: mol_type = other RNA
ccaccggcccagggcaatgaacacaaagagcatggggggcgtgtcgaagaatgtcacaggagatcgct

SEQ ID NO: 4812 - RNA, 68 nt, synthetic construct
  source 1..68: mol_type = other RNA
ccaccggcccagggcaatgaacacaaagagcatggggggcgtgtcgaagaatgtcacagggctgcgct

SEQ ID NO: 4813 - RNA, 68 nt, synthetic construct
  source 1..68: mol_type = other RNA
ccaccggcccagggcaatgaacacaaagagcatggggggcgtgtcgaagaatgtcacaggggagcgct

SEQ ID NO: 4814 - RNA, 68 nt, synthetic construct
  source 1..68: mol_type = other RNA
ccaccggcccagggcaatgaacacaaagagcatggggggcgtgtcgaagaatgtcacaggggatctct

SEQ ID NO: 4815 - RNA, 68 nt, synthetic construct
  source 1..68: mol_type = other RNA
ccaccggcccagggcaatgaacacaaagagcatggggggcgtgtcgaagaatgtcacaggagaacgct

SEQ ID NO: 4816 - RNA, 68 nt, synthetic construct
  source 1..68: mol_type = other RNA
ccaccggcccagggcaatgaacacaaagagcatggggggcgtgtcgaagaatgtcacagggctacgct

SEQ ID NO: 4817 - RNA, 68 nt, synthetic construct
  source 1..68: mol_type = other RNA
ccaccggcccagggcaatgaacacaaagagcatggggggcgtgtcgaagaatgtcacagggcttcgct

SEQ ID NO: 4818 - RNA, 68 nt, synthetic construct
  source 1..68: mol_type = other RNA
ccaccggcccagggcaatgaacacaaagagcatggggggcgtgtcgaagaatgtcacaggggaacgct

SEQ ID NO: 4819 - RNA, 68 nt, synthetic construct
  source 1..68: mol_type = other RNA
ccaccggcccagggcaatgaacacaaagagcatggggggcgtgtcgaagaatgtcacaggcgacctct

SEQ ID NO: 4820 - RNA, 68 nt, synthetic construct
  source 1..68: mol_type = other RNA
ccaccggcccagggcaatgaacacaaagagcatggggggcgtgtcgaagaatgtcacaggagacctct

SEQ ID NO: 4821 - RNA, 69 nt, synthetic construct
  source 1..69: mol_type = other RNA
gccaccggcccagggcaatgaacacaaagagcatggggggcgtgtcgaagaatgtcacaggtgatctct

SEQ ID NO: 4822 - RNA, 69 nt, synthetic construct
  source 1..69: mol_type = other RNA
gccaccggcccagggcaatgaacacaaagagcatggggggcgtgtcgaagaatgtcacaggtgaacgct

SEQ ID NO: 4823 - RNA, 69 nt, synthetic construct
  source 1..69: mol_type = other RNA
gccaccggcccagggcaatgaacacaaagagcatggggggcgtgtcgaagaatgtcacaggggaacgct

SEQ ID NO: 4824 - RNA, 69 nt, synthetic construct
  source 1..69: mol_type = other RNA
gccaccggcccagggcaatgaacacaaagagcatggggggcgtgtcgaagaatgtcacagggctgcgct

SEQ ID NO: 4825 - RNA, 69 nt, synthetic construct
  source 1..69: mol_type = other RNA
gccaccggcccagggcaatgaacacaaagagcatggggggcgtgtcgaagaatgtcacaggggatctct

SEQ ID NO: 4826 - RNA, 69 nt, synthetic construct
  source 1..69: mol_type = other RNA
gccaccggcccagggcaatgaacacaaagagcatggggggcgtgtcgaagaatgtcacaggtgatcgct

SEQ ID NO: 4827 - RNA, 69 nt, synthetic construct
  source 1..69: mol_type = other RNA
gccaccggcccagggcaatgaacacaaagagcatggggggcgtgtcgaagaatgtcacagggctcctct

SEQ ID NO: 4828 - RNA, 69 nt, synthetic construct
  source 1..69: mol_type = other RNA
gccaccggcccagggcaatgaacacaaagagcatggggggcgtgtcgaagaatgtcacaggagagcgct

SEQ ID NO: 4829 - RNA, 69 nt, synthetic construct
  source 1..69: mol_type = other RNA
gccaccggcccagggcaatgaacacaaagagcatggggggcgtgtcgaagaatgtcacaggcgatcgct

SEQ ID NO: 4830 - RNA, 69 nt, synthetic construct
  source 1..69: mol_type = other RNA
gccaccggcccagggcaatgaacacaaagagcatggggggcgtgtcgaagaatgtcacaggcgaacgct

SEQ ID NO: 4831 - RNA, 69 nt, synthetic construct
  source 1..69: mol_type = other RNA
gccaccggcccagggcaatgaacacaaagagcatggggggcgtgtcgaagaatgtcacagggcttcgct

SEQ ID NO: 4832 - RNA, 69 nt, synthetic construct
  source 1..69: mol_type = other RNA
gccaccggcccagggcaatgaacacaaagagcatggggggcgtgtcgaagaatgtcacaggtgagcgct

SEQ ID NO: 4833 - RNA, 69 nt, synthetic construct
  source 1..69: mol_type = other RNA
gccaccggcccagggcaatgaacacaaagagcatggggggcgtgtcgaagaatgtcacaggcgatctct

SEQ ID NO: 4834 - RNA, 69 nt, synthetic construct
  source 1..69: mol_type = other RNA
gccaccggcccagggcaatgaacacaaagagcatggggggcgtgtcgaagaatgtcacaggagatctct

SEQ ID NO: 4835 - RNA, 69 nt, synthetic construct
  source 1..69: mol_type = other RNA
gccaccggcccagggcaatgaacacaaagagcatggggggcgtgtcgaagaatgtcacagggcttctct

SEQ ID NO: 4836 - RNA, 69 nt, synthetic construct
  source 1..69: mol_type = other RNA
gccaccggcccagggcaatgaacacaaagagcatggggggcgtgtcgaagaatgtcacaggggagcgct

SEQ ID NO: 4837 - RNA, 69 nt, synthetic construct
  source 1..69: mol_type = other RNA
gccaccggcccagggcaatgaacacaaagagcatggggggcgtgtcgaagaatgtcacaggagaacgct

SEQ ID NO: 4838 - RNA, 69 nt, synthetic construct
  source 1..69: mol_type = other RNA
gccaccggcccagggcaatgaacacaaagagcatggggggcgtgtcgaagaatgtcacaggggacctct

SEQ ID NO: 4839 - RNA, 69 nt, synthetic construct
  source 1..69: mol_type = other RNA
gccaccggcccagggcaatgaacacaaagagcatggggggcgtgtcgaagaatgtcacaggtgacctct

SEQ ID NO: 4840 - RNA, 69 nt, synthetic construct
  source 1..69: mol_type = other RNA
gccaccggcccagggcaatgaacacaaagagcatggggggcgtgtcgaagaatgtcacaggcgagcgct

SEQ ID NO: 4841 - RNA, 69 nt, synthetic construct
  source 1..69: mol_type = other RNA
gccaccggcccagggcaatgaacacaaagagcatggggggcgtgtcgaagaatgtcacaggcgacctct

SEQ ID NO: 4842 - RNA, 69 nt, synthetic construct
  source 1..69: mol_type = other RNA
gccaccggcccagggcaatgaacacaaagagcatggggggcgtgtcgaagaatgtcacagggctacgct

SEQ ID NO: 4843 - RNA, 69 nt, synthetic construct
  source 1..69: mol_type = other RNA
gccaccggcccagggcaatgaacacaaagagcatggggggcgtgtcgaagaatgtcacaggagacctct

SEQ ID NO: 4844 - RNA, 69 nt, synthetic construct
  source 1..69: mol_type = other RNA
gccaccggcccagggcaatgaacacaaagagcatggggggcgtgtcgaagaatgtcacaggggatcgct

SEQ ID NO: 4845 - RNA, 69 nt, synthetic construct
  source 1..69: mol_type = other RNA
gccaccggcccagggcaatgaacacaaagagcatggggggcgtgtcgaagaatgtcacaggagatcgct

SEQ ID NO: 4846 - RNA, 70 nt, synthetic construct
  source 1..70: mol_type = other RNA
agccaccggcccagggcaatgaacacaaagagcatggggggcgtgtcgaagaatgtcacaggagatcgct

SEQ ID NO: 4847 - RNA, 70 nt, synthetic construct
  source 1..70: mol_type = other RNA
agccaccggcccagggcaatgaacacaaagagcatggggggcgtgtcgaagaatgtcacagggctacgct

SEQ ID NO: 4848 - RNA, 70 nt, synthetic construct
  source 1..70: mol_type = other RNA
agccaccggcccagggcaatgaacacaaagagcatggggggcgtgtcgaagaatgtcacaggtgatcgct

SEQ ID NO: 4849 - RNA, 70 nt, synthetic construct
  source 1..70: mol_type = other RNA
agccaccggcccagggcaatgaacacaaagagcatggggggcgtgtcgaagaatgtcacaggggagcgct

SEQ ID NO: 4850 - RNA, 70 nt, synthetic construct
  source 1..70: mol_type = other RNA
agccaccggcccagggcaatgaacacaaagagcatggggggcgtgtcgaagaatgtcacaggtgatctct

SEQ ID NO: 4851 - RNA, 70 nt, synthetic construct
  source 1..70: mol_type = other RNA
agccaccggcccagggcaatgaacacaaagagcatggggggcgtgtcgaagaatgtcacagggctcctct

SEQ ID NO: 4852 - RNA, 70 nt, synthetic construct
  source 1..70: mol_type = other RNA
agccaccggcccagggcaatgaacacaaagagcatggggggcgtgtcgaagaatgtcacaggcgacctct

SEQ ID NO: 4853 - RNA, 70 nt, synthetic construct
  source 1..70: mol_type = other RNA
agccaccggcccagggcaatgaacacaaagagcatggggggcgtgtcgaagaatgtcacaggagatctct

SEQ ID NO: 4854 - RNA, 70 nt, synthetic construct
  source 1..70: mol_type = other RNA
agccaccggcccagggcaatgaacacaaagagcatggggggcgtgtcgaagaatgtcacaggcgagcgct

SEQ ID NO: 4855 - RNA, 70 nt, synthetic construct
  source 1..70: mol_type = other RNA
agccaccggcccagggcaatgaacacaaagagcatggggggcgtgtcgaagaatgtcacaggggaacgct

SEQ ID NO: 4856 - RNA, 70 nt, synthetic construct
  source 1..70: mol_type = other RNA
agccaccggcccagggcaatgaacacaaagagcatggggggcgtgtcgaagaatgtcacaggagagcgct

SEQ ID NO: 4857 - RNA, 70 nt, synthetic construct
  source 1..70: mol_type = other RNA
agccaccggcccagggcaatgaacacaaagagcatggggggcgtgtcgaagaatgtcacaggtgaacgct

SEQ ID NO: 4858 - RNA, 70 nt, synthetic construct
  source 1..70: mol_type = other RNA
agccaccggcccagggcaatgaacacaaagagcatggggggcgtgtcgaagaatgtcacaggagaacgct

SEQ ID NO: 4859 - RNA, 70 nt, synthetic construct
  source 1..70: mol_type = other RNA
agccaccggcccagggcaatgaacacaaagagcatggggggcgtgtcgaagaatgtcacagggcttctct

SEQ ID NO: 4860 - RNA, 70 nt, synthetic construct
  source 1..70: mol_type = other RNA
agccaccggcccagggcaatgaacacaaagagcatggggggcgtgtcgaagaatgtcacagggcttcgct

SEQ ID NO: 4861 - RNA, 70 nt, synthetic construct
  source 1..70: mol_type = other RNA
agccaccggcccagggcaatgaacacaaagagcatggggggcgtgtcgaagaatgtcacaggggacctct

SEQ ID NO: 4862 - RNA, 70 nt, synthetic construct
  source 1..70: mol_type = other RNA
agccaccggcccagggcaatgaacacaaagagcatggggggcgtgtcgaagaatgtcacaggtgacctct

SEQ ID NO: 4863 - RNA, 70 nt, synthetic construct
  source 1..70: mol_type = other RNA
agccaccggcccagggcaatgaacacaaagagcatggggggcgtgtcgaagaatgtcacaggcgatctct

SEQ ID NO: 4864 - RNA, 70 nt, synthetic construct
  source 1..70: mol_type = other RNA
agccaccggcccagggcaatgaacacaaagagcatggggggcgtgtcgaagaatgtcacaggcgatcgct

SEQ ID NO: 4865 - RNA, 70 nt, synthetic construct
  source 1..70: mol_type = other RNA
agccaccggcccagggcaatgaacacaaagagcatggggggcgtgtcgaagaatgtcacaggggatctct

SEQ ID NO: 4866 - RNA, 70 nt, synthetic construct
  source 1..70: mol_type = other RNA
agccaccggcccagggcaatgaacacaaagagcatggggggcgtgtcgaagaatgtcacagggctgcgct

SEQ ID NO: 4867 - RNA, 70 nt, synthetic construct
  source 1..70: mol_type = other RNA
agccaccggcccagggcaatgaacacaaagagcatggggggcgtgtcgaagaatgtcacaggtgagcgct

SEQ ID NO: 4868 - RNA, 70 nt, synthetic construct
  source 1..70: mol_type = other RNA
agccaccggcccagggcaatgaacacaaagagcatggggggcgtgtcgaagaatgtcacaggagacctct

SEQ ID NO: 4869 - RNA, 70 nt, synthetic construct
  source 1..70: mol_type = other RNA
agccaccggcccagggcaatgaacacaaagagcatggggggcgtgtcgaagaatgtcacaggcgaacgct

SEQ ID NO: 4870 - RNA, 70 nt, synthetic construct
  source 1..70: mol_type = other RNA
agccaccggcccagggcaatgaacacaaagagcatggggggcgtgtcgaagaatgtcacaggggatcgct

SEQ ID NO: 4871 - RNA, 71 nt, synthetic construct
  source 1..71: mol_type = other RNA
cagccaccggcccagggcaatgaacacaaagagcatggggggcgtgtcgaagaatgtcacaggggacctct

SEQ ID NO: 4872 - RNA, 71 nt, synthetic construct
  source 1..71: mol_type = other RNA
cagccaccggcccagggcaatgaacacaaagagcatggggggcgtgtcgaagaatgtcacaggcgagcgct

SEQ ID NO: 4873 - RNA, 71 nt, synthetic construct
  source 1..71: mol_type = other RNA
cagccaccggcccagggcaatgaacacaaagagcatggggggcgtgtcgaagaatgtcacagggctgcgct

SEQ ID NO: 4874 - RNA, 71 nt, synthetic construct
  source 1..71: mol_type = other RNA
cagccaccggcccagggcaatgaacacaaagagcatggggggcgtgtcgaagaatgtcacaggcgatctct

SEQ ID NO: 4875 - RNA, 71 nt, synthetic construct
  source 1..71: mol_type = other RNA
cagccaccggcccagggcaatgaacacaaagagcatggggggcgtgtcgaagaatgtcacagggcttctct

SEQ ID NO: 4876 - RNA, 71 nt, synthetic construct
  source 1..71: mol_type = other RNA
cagccaccggcccagggcaatgaacacaaagagcatggggggcgtgtcgaagaatgtcacaggcgaacgct

SEQ ID NO: 4877 - RNA, 71 nt, synthetic construct
  source 1..71: mol_type = other RNA
cagccaccggcccagggcaatgaacacaaagagcatggggggcgtgtcgaagaatgtcacaggtgatctct

SEQ ID NO: 4878 - RNA, 71 nt, synthetic construct
  source 1..71: mol_type = other RNA
cagccaccggcccagggcaatgaacacaaagagcatggggggcgtgtcgaagaatgtcacaggagagcgct

SEQ ID NO: 4879 - RNA, 71 nt, synthetic construct
  source 1..71: mol_type = other RNA
cagccaccggcccagggcaatgaacacaaagagcatggggggcgtgtcgaagaatgtcacagggctcctct

SEQ ID NO: 4880 - RNA, 71 nt, synthetic construct
  source 1..71: mol_type = other RNA
cagccaccggcccagggcaatgaacacaaagagcatggggggcgtgtcgaagaatgtcacaggtgatcgct

SEQ ID NO: 4881 - RNA, 71 nt, synthetic construct
  source 1..71: mol_type = other RNA
cagccaccggcccagggcaatgaacacaaagagcatggggggcgtgtcgaagaatgtcacaggtgagcgct

SEQ ID NO: 4882 - RNA, 71 nt, synthetic construct
  source 1..71: mol_type = other RNA
cagccaccggcccagggcaatgaacacaaagagcatggggggcgtgtcgaagaatgtcacaggggatcgct

SEQ ID NO: 4883 - RNA, 71 nt, synthetic construct
  source 1..71: mol_type = other RNA
cagccaccggcccagggcaatgaacacaaagagcatggggggcgtgtcgaagaatgtcacaggggatctct

SEQ ID NO: 4884 - RNA, 71 nt, synthetic construct
  source 1..71: mol_type = other RNA
cagccaccggcccagggcaatgaacacaaagagcatggggggcgtgtcgaagaatgtcacaggggagcgct

SEQ ID NO: 4885 - RNA, 71 nt, synthetic construct
  source 1..71: mol_type = other RNA
cagccaccggcccagggcaatgaacacaaagagcatggggggcgtgtcgaagaatgtcacaggtgacctct

SEQ ID NO: 4886 - RNA, 71 nt, synthetic construct
  source 1..71: mol_type = other RNA
cagccaccggcccagggcaatgaacacaaagagcatggggggcgtgtcgaagaatgtcacaggggaacgct

SEQ ID NO: 4887 - RNA, 71 nt, synthetic construct
  source 1..71: mol_type = other RNA
cagccaccggcccagggcaatgaacacaaagagcatggggggcgtgtcgaagaatgtcacaggtgaacgct

SEQ ID NO: 4888 - RNA, 71 nt, synthetic construct
  source 1..71: mol_type = other RNA
cagccaccggcccagggcaatgaacacaaagagcatggggggcgtgtcgaagaatgtcacaggcgatcgct

SEQ ID NO: 4889 - RNA, 71 nt, synthetic construct
  source 1..71: mol_type = other RNA
cagccaccggcccagggcaatgaacacaaagagcatggggggcgtgtcgaagaatgtcacagggcttcgct

SEQ ID NO: 4890 - RNA, 71 nt, synthetic construct
  source 1..71: mol_type = other RNA
cagccaccggcccagggcaatgaacacaaagagcatggggggcgtgtcgaagaatgtcacaggagatctct

SEQ ID NO: 4891 - RNA, 71 nt, synthetic construct
  source 1..71: mol_type = other RNA
cagccaccggcccagggcaatgaacacaaagagcatggggggcgtgtcgaagaatgtcacaggagatcgct

SEQ ID NO: 4892 - RNA, 71 nt, synthetic construct
  source 1..71: mol_type = other RNA
cagccaccggcccagggcaatgaacacaaagagcatggggggcgtgtcgaagaatgtcacaggagaacgct

SEQ ID NO: 4893 - RNA, 71 nt, synthetic construct
  source 1..71: mol_type = other RNA
cagccaccggcccagggcaatgaacacaaagagcatggggggcgtgtcgaagaatgtcacaggagacctct

SEQ ID NO: 4894 - RNA, 71 nt, synthetic construct
  source 1..71: mol_type = other RNA
cagccaccggcccagggcaatgaacacaaagagcatggggggcgtgtcgaagaatgtcacagggctacgct

SEQ ID NO: 4895 - RNA, 71 nt, synthetic construct
  source 1..71: mol_type = other RNA
cagccaccggcccagggcaatgaacacaaagagcatggggggcgtgtcgaagaatgtcacaggcgacctct

SEQ ID NO: 4896 - RNA, 72 nt, synthetic construct
  source 1..72: mol_type = other RNA
ccagccaccggcccagggcaatgaacacaaagagcatggggggcgtgtcgaagaatgtcacagggctgcgct

SEQ ID NO: 4897 - RNA, 72 nt, synthetic construct
  source 1..72: mol_type = other RNA
ccagccaccggcccagggcaatgaacacaaagagcatggggggcgtgtcgaagaatgtcacaggcgagcgct

SEQ ID NO: 4898 - RNA, 72 nt, synthetic construct
  source 1..72: mol_type = other RNA
ccagccaccggcccagggcaatgaacacaaagagcatggggggcgtgtcgaagaatgtcacaggagaacgct

SEQ ID NO: 4899 - RNA, 72 nt, synthetic construct
  source 1..72: mol_type = other RNA
ccagccaccggcccagggcaatgaacacaaagagcatggggggcgtgtcgaagaatgtcacaggcgatcgct

SEQ ID NO: 4900 - RNA, 72 nt, synthetic construct
  source 1..72: mol_type = other RNA
ccagccaccggcccagggcaatgaacacaaagagcatggggggcgtgtcgaagaatgtcacaggtgatcgct

SEQ ID NO: 4901 - RNA, 72 nt, synthetic construct
  source 1..72: mol_type = other RNA
ccagccaccggcccagggcaatgaacacaaagagcatggggggcgtgtcgaagaatgtcacagggctcctct

SEQ ID NO: 4902 - RNA, 72 nt, synthetic construct
  source 1..72: mol_type = other RNA
ccagccaccggcccagggcaatgaacacaaagagcatggggggcgtgtcgaagaatgtcacaggagatcgct

SEQ ID NO: 4903 - RNA, 72 nt, synthetic construct
  source 1..72: mol_type = other RNA
ccagccaccggcccagggcaatgaacacaaagagcatggggggcgtgtcgaagaatgtcacaggggacctct

SEQ ID NO: 4904 - RNA, 72 nt, synthetic construct
  source 1..72: mol_type = other RNA
ccagccaccggcccagggcaatgaacacaaagagcatggggggcgtgtcgaagaatgtcacagggctacgct

SEQ ID NO: 4905 - RNA, 72 nt, synthetic construct
  source 1..72: mol_type = other RNA
ccagccaccggcccagggcaatgaacacaaagagcatggggggcgtgtcgaagaatgtcacaggcgacctct

SEQ ID NO: 4906 - RNA, 72 nt, synthetic construct
  source 1..72: mol_type = other RNA
ccagccaccggcccagggcaatgaacacaaagagcatggggggcgtgtcgaagaatgtcacaggggagcgct

SEQ ID NO: 4907 - RNA, 72 nt, synthetic construct
  source 1..72: mol_type = other RNA
ccagccaccggcccagggcaatgaacacaaagagcatggggggcgtgtcgaagaatgtcacaggcgaacgct

SEQ ID NO: 4908 - RNA, 72 nt, synthetic construct
  source 1..72: mol_type = other RNA
ccagccaccggcccagggcaatgaacacaaagagcatggggggcgtgtcgaagaatgtcacaggagacctct

SEQ ID NO: 4909 - RNA, 72 nt, synthetic construct
  source 1..72: mol_type = other RNA
ccagccaccggcccagggcaatgaacacaaagagcatggggggcgtgtcgaagaatgtcacaggagatctct

SEQ ID NO: 4910 - RNA, 72 nt, synthetic construct
  source 1..72: mol_type = other RNA
ccagccaccggcccagggcaatgaacacaaagagcatggggggcgtgtcgaagaatgtcacaggtgatctct

SEQ ID NO: 4911 - RNA, 72 nt, synthetic construct
  source 1..72: mol_type = other RNA
ccagccaccggcccagggcaatgaacacaaagagcatggggggcgtgtcgaagaatgtcacaggcgatctct

SEQ ID NO: 4912 - RNA, 72 nt, synthetic construct
  source 1..72: mol_type = other RNA
ccagccaccggcccagggcaatgaacacaaagagcatggggggcgtgtcgaagaatgtcacagggcttctct

SEQ ID NO: 4913 - RNA, 72 nt, synthetic construct
  source 1..72: mol_type = other RNA
ccagccaccggcccagggcaatgaacacaaagagcatggggggcgtgtcgaagaatgtcacaggggatcgct

SEQ ID NO: 4914 - RNA, 72 nt, synthetic construct
  source 1..72: mol_type = other RNA
ccagccaccggcccagggcaatgaacacaaagagcatggggggcgtgtcgaagaatgtcacaggagagcgct

SEQ ID NO: 4915 - RNA, 72 nt, synthetic construct
  source 1..72: mol_type = other RNA
ccagccaccggcccagggcaatgaacacaaagagcatggggggcgtgtcgaagaatgtcacaggtgaacgct

SEQ ID NO: 4916 - RNA, 72 nt, synthetic construct
  source 1..72: mol_type = other RNA
ccagccaccggcccagggcaatgaacacaaagagcatggggggcgtgtcgaagaatgtcacaggggaacgct

SEQ ID NO: 4917 - RNA, 72 nt, synthetic construct
  source 1..72: mol_type = other RNA
ccagccaccggcccagggcaatgaacacaaagagcatggggggcgtgtcgaagaatgtcacagggcttcgct

SEQ ID NO: 4918 - RNA, 72 nt, synthetic construct
  source 1..72: mol_type = other RNA
ccagccaccggcccagggcaatgaacacaaagagcatggggggcgtgtcgaagaatgtcacaggtgagcgct

SEQ ID NO: 4919 - RNA, 72 nt, synthetic construct
  source 1..72: mol_type = other RNA
ccagccaccggcccagggcaatgaacacaaagagcatggggggcgtgtcgaagaatgtcacaggtgacctct

SEQ ID NO: 4920 - RNA, 72 nt, synthetic construct
  source 1..72: mol_type = other RNA
ccagccaccggcccagggcaatgaacacaaagagcatggggggcgtgtcgaagaatgtcacaggggatctct

SEQ ID NO: 4921 - RNA, 73 nt, synthetic construct
  source 1..73: mol_type = other RNA
tccagccaccggcccagggcaatgaacacaaagagcatggggggcgtgtcgaagaatgtcacaggagatctct

SEQ ID NO: 4922 - RNA, 73 nt, synthetic construct
  source 1..73: mol_type = other RNA
tccagccaccggcccagggcaatgaacacaaagagcatggggggcgtgtcgaagaatgtcacagggcttcgct

SEQ ID NO: 4923 - RNA, 73 nt, synthetic construct
  source 1..73: mol_type = other RNA
tccagccaccggcccagggcaatgaacacaaagagcatggggggcgtgtcgaagaatgtcacaggtgaacgct

SEQ ID NO: 4924 - RNA, 73 nt, synthetic construct
  source 1..73: mol_type = other RNA
tccagccaccggcccagggcaatgaacacaaagagcatggggggcgtgtcgaagaatgtcacaggcgatcgct

SEQ ID NO: 4925 - RNA, 73 nt, synthetic construct
  source 1..73: mol_type = other RNA
tccagccaccggcccagggcaatgaacacaaagagcatggggggcgtgtcgaagaatgtcacagggctacgct

SEQ ID NO: 4926 - RNA, 73 nt, synthetic construct
  source 1..73: mol_type = other RNA
tccagccaccggcccagggcaatgaacacaaagagcatggggggcgtgtcgaagaatgtcacaggcgaacgct

SEQ ID NO: 4927 - RNA, 73 nt, synthetic construct
  source 1..73: mol_type = other RNA
tccagccaccggcccagggcaatgaacacaaagagcatggggggcgtgtcgaagaatgtcacagggctgcgct

SEQ ID NO: 4928 - RNA, 73 nt, synthetic construct
  source 1..73: mol_type = other RNA
tccagccaccggcccagggcaatgaacacaaagagcatggggggcgtgtcgaagaatgtcacaggggacctct

SEQ ID NO: 4929 - RNA, 73 nt, synthetic construct
  source 1..73: mol_type = other RNA
tccagccaccggcccagggcaatgaacacaaagagcatggggggcgtgtcgaagaatgtcacaggtgatctct

SEQ ID NO: 4930 - RNA, 73 nt, synthetic construct
  source 1..73: mol_type = other RNA
tccagccaccggcccagggcaatgaacacaaagagcatggggggcgtgtcgaagaatgtcacaggtgagcgct

SEQ ID NO: 4931 - RNA, 73 nt, synthetic construct
  source 1..73: mol_type = other RNA
tccagccaccggcccagggcaatgaacacaaagagcatggggggcgtgtcgaagaatgtcacaggagagcgct

SEQ ID NO: 4932 - RNA, 73 nt, synthetic construct
  source 1..73: mol_type = other RNA
tccagccaccggcccagggcaatgaacacaaagagcatggggggcgtgtcgaagaatgtcacaggtgacctct

SEQ ID NO: 4933 - RNA, 73 nt, synthetic construct
  source 1..73: mol_type = other RNA
tccagccaccggcccagggcaatgaacacaaagagcatggggggcgtgtcgaagaatgtcacagggctcctct

SEQ ID NO: 4934 - RNA, 73 nt, synthetic construct
  source 1..73: mol_type = other RNA
tccagccaccggcccagggcaatgaacacaaagagcatggggggcgtgtcgaagaatgtcacaggagaacgct

SEQ ID NO: 4935 - RNA, 73 nt, synthetic construct
  source 1..73: mol_type = other RNA
tccagccaccggcccagggcaatgaacacaaagagcatggggggcgtgtcgaagaatgtcacaggggagcgct

SEQ ID NO: 4936 - RNA, 73 nt, synthetic construct
  source 1..73: mol_type = other RNA
tccagccaccggcccagggcaatgaacacaaagagcatggggggcgtgtcgaagaatgtcacaggcgatctct

SEQ ID NO: 4937 - RNA, 73 nt, synthetic construct
  source 1..73: mol_type = other RNA
tccagccaccggcccagggcaatgaacacaaagagcatggggggcgtgtcgaagaatgtcacaggggaacgct

SEQ ID NO: 4938 - RNA, 73 nt, synthetic construct
  source 1..73: mol_type = other RNA
tccagccaccggcccagggcaatgaacacaaagagcatggggggcgtgtcgaagaatgtcacaggggatctct

SEQ ID NO: 4939 - RNA, 73 nt, synthetic construct
  source 1..73: mol_type = other RNA
tccagccaccggcccagggcaatgaacacaaagagcatggggggcgtgtcgaagaatgtcacagggcttctct

SEQ ID NO: 4940 - RNA, 73 nt, synthetic construct
  source 1..73: mol_type = other RNA
tccagccaccggcccagggcaatgaacacaaagagcatggggggcgtgtcgaagaatgtcacaggtgatcgct

SEQ ID NO: 4941 - RNA, 73 nt, synthetic construct
  source 1..73: mol_type = other RNA
tccagccaccggcccagggcaatgaacacaaagagcatggggggcgtgtcgaagaatgtcacaggcgagcgct

SEQ ID NO: 4942 - RNA, 73 nt, synthetic construct
  source 1..73: mol_type = other RNA
tccagccaccggcccagggcaatgaacacaaagagcatggggggcgtgtcgaagaatgtcacaggcgacctct

SEQ ID NO: 4943 - RNA, 73 nt, synthetic construct
  source 1..73: mol_type = other RNA
tccagccaccggcccagggcaatgaacacaaagagcatggggggcgtgtcgaagaatgtcacaggggatcgct

SEQ ID NO: 4944 - RNA, 73 nt, synthetic construct
  source 1..73: mol_type = other RNA
tccagccaccggcccagggcaatgaacacaaagagcatggggggcgtgtcgaagaatgtcacaggagacctct

SEQ ID NO: 4945 - RNA, 73 nt, synthetic construct
  source 1..73: mol_type = other RNA
tccagccaccggcccagggcaatgaacacaaagagcatggggggcgtgtcgaagaatgtcacaggagatcgct

SEQ ID NO: 4946 - RNA, 74 nt, synthetic construct
  source 1..74: mol_type = other RNA
ttccagccaccggcccagggcaatgaacacaaagagcatggggggcgtgtcgaagaatgtcacaggcgacctct

SEQ ID NO: 4947 - RNA, 74 nt, synthetic construct
  source 1..74: mol_type = other RNA
ttccagccaccggcccagggcaatgaacacaaagagcatggggggcgtgtcgaagaatgtcacagggctgcgct

SEQ ID NO: 4948 - RNA, 74 nt, synthetic construct
  source 1..74: mol_type = other RNA
ttccagccaccggcccagggcaatgaacacaaagagcatggggggcgtgtcgaagaatgtcacaggagatctct

SEQ ID NO: 4949 - RNA, 74 nt, synthetic construct
  source 1..74: mol_type = other RNA
ttccagccaccggcccagggcaatgaacacaaagagcatggggggcgtgtcgaagaatgtcacagggctcctct

SEQ ID NO: 4950 - RNA, 74 nt, synthetic construct
  source 1..74: mol_type = other RNA
ttccagccaccggcccagggcaatgaacacaaagagcatggggggcgtgtcgaagaatgtcacagggcttctct

SEQ ID NO: 4951 - RNA, 74 nt, synthetic construct
  source 1..74: mol_type = other RNA
ttccagccaccggcccagggcaatgaacacaaagagcatggggggcgtgtcgaagaatgtcacaggtgacctct

SEQ ID NO: 4952 - RNA, 74 nt, synthetic construct
  source 1..74: mol_type = other RNA
ttccagccaccggcccagggcaatgaacacaaagagcatggggggcgtgtcgaagaatgtcacaggtgatctct

SEQ ID NO: 4953 - RNA, 74 nt, synthetic construct
  source 1..74: mol_type = other RNA
ttccagccaccggcccagggcaatgaacacaaagagcatggggggcgtgtcgaagaatgtcacaggggagcgct

SEQ ID NO: 4954 - RNA, 74 nt, synthetic construct
  source 1..74: mol_type = other RNA
ttccagccaccggcccagggcaatgaacacaaagagcatggggggcgtgtcgaagaatgtcacaggggacctct

SEQ ID NO: 4955 - RNA, 74 nt, synthetic construct
  source 1..74: mol_type = other RNA
ttccagccaccggcccagggcaatgaacacaaagagcatggggggcgtgtcgaagaatgtcacaggagacctct

SEQ ID NO: 4956 - RNA, 74 nt, synthetic construct
  source 1..74: mol_type = other RNA
ttccagccaccggcccagggcaatgaacacaaagagcatggggggcgtgtcgaagaatgtcacaggggatctct

SEQ ID NO: 4957 - RNA, 74 nt, synthetic construct
  source 1..74: mol_type = other RNA
ttccagccaccggcccagggcaatgaacacaaagagcatggggggcgtgtcgaagaatgtcacaggagaacgct

SEQ ID NO: 4958 - RNA, 74 nt, synthetic construct
  source 1..74: mol_type = other RNA
ttccagccaccggcccagggcaatgaacacaaagagcatggggggcgtgtcgaagaatgtcacagggcttcgct

SEQ ID NO: 4959 - RNA, 74 nt, synthetic construct
  source 1..74: mol_type = other RNA
ttccagccaccggcccagggcaatgaacacaaagagcatggggggcgtgtcgaagaatgtcacagggctacgct

SEQ ID NO: 4960 - RNA, 74 nt, synthetic construct
  source 1..74: mol_type = other RNA
ttccagccaccggcccagggcaatgaacacaaagagcatggggggcgtgtcgaagaatgtcacaggcgagcgct

SEQ ID NO: 4961 - RNA, 74 nt, synthetic construct
  source 1..74: mol_type = other RNA
ttccagccaccggcccagggcaatgaacacaaagagcatggggggcgtgtcgaagaatgtcacaggagatcgct

SEQ ID NO: 4962 - RNA, 74 nt, synthetic construct
  source 1..74: mol_type = other RNA
ttccagccaccggcccagggcaatgaacacaaagagcatggggggcgtgtcgaagaatgtcacaggcgatcgct

SEQ ID NO: 4963 - RNA, 74 nt, synthetic construct
  source 1..74: mol_type = other RNA
ttccagccaccggcccagggcaatgaacacaaagagcatggggggcgtgtcgaagaatgtcacaggcgatctct

SEQ ID NO: 4964 - RNA, 74 nt, synthetic construct
  source 1..74: mol_type = other RNA
ttccagccaccggcccagggcaatgaacacaaagagcatggggggcgtgtcgaagaatgtcacaggcgaacgct

SEQ ID NO: 4965 - RNA, 74 nt, synthetic construct
  source 1..74: mol_type = other RNA
ttccagccaccggcccagggcaatgaacacaaagagcatggggggcgtgtcgaagaatgtcacaggggaacgct

SEQ ID NO: 4966 - RNA, 74 nt, synthetic construct
  source 1..74: mol_type = other RNA
ttccagccaccggcccagggcaatgaacacaaagagcatggggggcgtgtcgaagaatgtcacaggtgaacgct

SEQ ID NO: 4967 - RNA, 74 nt, synthetic construct
  source 1..74: mol_type = other RNA
ttccagccaccggcccagggcaatgaacacaaagagcatggggggcgtgtcgaagaatgtcacaggtgagcgct

SEQ ID NO: 4968 - RNA, 74 nt, synthetic construct
  source 1..74: mol_type = other RNA
ttccagccaccggcccagggcaatgaacacaaagagcatggggggcgtgtcgaagaatgtcacaggtgatcgct

SEQ ID NO: 4969 - RNA, 74 nt, synthetic construct
  source 1..74: mol_type = other RNA
ttccagccaccggcccagggcaatgaacacaaagagcatggggggcgtgtcgaagaatgtcacaggggatcgct

SEQ ID NO: 4970 - RNA, 74 nt, synthetic construct
  source 1..74: mol_type = other RNA
ttccagccaccggcccagggcaatgaacacaaagagcatggggggcgtgtcgaagaatgtcacaggagagcgct

SEQ ID NO: 4971 - RNA, 75 nt, synthetic construct
  source 1..75: mol_type = other RNA
gttccagccaccggcccagggcaatgaacacaaagagcatggggggcgtgtcgaagaatgtcacaggagatctct

SEQ ID NO: 4972 - RNA, 75 nt, synthetic construct
  source 1..75: mol_type = other RNA
gttccagccaccggcccagggcaatgaacacaaagagcatggggggcgtgtcgaagaatgtcacagggcttcgct

SEQ ID NO: 4973 - RNA, 75 nt, synthetic construct
  source 1..75: mol_type = other RNA
gttccagccaccggcccagggcaatgaacacaaagagcatggggggcgtgtcgaagaatgtcacaggggaacgct

SEQ ID NO: 4974 - RNA, 75 nt, synthetic construct
  source 1..75: mol_type = other RNA
gttccagccaccggcccagggcaatgaacacaaagagcatggggggcgtgtcgaagaatgtcacaggggatcgct

SEQ ID NO: 4975 - RNA, 75 nt, synthetic construct
  source 1..75: mol_type = other RNA
gttccagccaccggcccagggcaatgaacacaaagagcatggggggcgtgtcgaagaatgtcacaggagacctct

SEQ ID NO: 4976 - RNA, 75 nt, synthetic construct
  source 1..75: mol_type = other RNA
gttccagccaccggcccagggcaatgaacacaaagagcatggggggcgtgtcgaagaatgtcacagggcttctct

SEQ ID NO: 4977 - RNA, 75 nt, synthetic construct
  source 1..75: mol_type = other RNA
gttccagccaccggcccagggcaatgaacacaaagagcatggggggcgtgtcgaagaatgtcacaggtgacctct

SEQ ID NO: 4978 - RNA, 75 nt, synthetic construct
  source 1..75: mol_type = other RNA
gttccagccaccggcccagggcaatgaacacaaagagcatggggggcgtgtcgaagaatgtcacaggagagcgct

SEQ ID NO: 4979 - RNA, 75 nt, synthetic construct
  source 1..75: mol_type = other RNA
gttccagccaccggcccagggcaatgaacacaaagagcatggggggcgtgtcgaagaatgtcacaggcgagcgct

SEQ ID NO: 4980 - RNA, 75 nt, synthetic construct
  source 1..75: mol_type = other RNA
gttccagccaccggcccagggcaatgaacacaaagagcatggggggcgtgtcgaagaatgtcacagggctgcgct

SEQ ID NO: 4981 - RNA, 75 nt, synthetic construct
  source 1..75: mol_type = other RNA
gttccagccaccggcccagggcaatgaacacaaagagcatggggggcgtgtcgaagaatgtcacagggctacgct

SEQ ID NO: 4982 - RNA, 75 nt, synthetic construct
  source 1..75: mol_type = other RNA
gttccagccaccggcccagggcaatgaacacaaagagcatggggggcgtgtcgaagaatgtcacagggctcctct

SEQ ID NO: 4983 - RNA, 75 nt, synthetic construct
  source 1..75: mol_type = other RNA
gttccagccaccggcccagggcaatgaacacaaagagcatggggggcgtgtcgaagaatgtcacaggcgacctct

SEQ ID NO: 4984 - RNA, 75 nt, synthetic construct
  source 1..75: mol_type = other RNA
gttccagccaccggcccagggcaatgaacacaaagagcatggggggcgtgtcgaagaatgtcacaggcgatcgct

SEQ ID NO: 4985 - RNA, 75 nt, synthetic construct
  source 1..75: mol_type = other RNA
gttccagccaccggcccagggcaatgaacacaaagagcatggggggcgtgtcgaagaatgtcacaggcgaacgct

SEQ ID NO: 4986 - RNA, 75 nt, synthetic construct
  source 1..75: mol_type = other RNA
gttccagccaccggcccagggcaatgaacacaaagagcatggggggcgtgtcgaagaatgtcacaggtgagcgct

SEQ ID NO: 4987 - RNA, 75 nt, synthetic construct
  source 1..75: mol_type = other RNA
gttccagccaccggcccagggcaatgaacacaaagagcatggggggcgtgtcgaagaatgtcacaggagatcgct

SEQ ID NO: 4988 - RNA, 75 nt, synthetic construct
  source 1..75: mol_type = other RNA
gttccagccaccggcccagggcaatgaacacaaagagcatggggggcgtgtcgaagaatgtcacaggtgatctct

SEQ ID NO: 4989 - RNA, 75 nt, synthetic construct
  source 1..75: mol_type = other RNA
gttccagccaccggcccagggcaatgaacacaaagagcatggggggcgtgtcgaagaatgtcacaggtgatcgct

SEQ ID NO: 4990 - RNA, 75 nt, synthetic construct
  source 1..75: mol_type = other RNA
gttccagccaccggcccagggcaatgaacacaaagagcatggggggcgtgtcgaagaatgtcacaggggatctct

SEQ ID NO: 4991 - RNA, 75 nt, synthetic construct
  source 1..75: mol_type = other RNA
gttccagccaccggcccagggcaatgaacacaaagagcatggggggcgtgtcgaagaatgtcacaggcgatctct

SEQ ID NO: 4992 - RNA, 75 nt, synthetic construct
  source 1..75: mol_type = other RNA
gttccagccaccggcccagggcaatgaacacaaagagcatggggggcgtgtcgaagaatgtcacaggagaacgct

SEQ ID NO: 4993 - RNA, 75 nt, synthetic construct
  source 1..75: mol_type = other RNA
gttccagccaccggcccagggcaatgaacacaaagagcatggggggcgtgtcgaagaatgtcacaggggagcgct

SEQ ID NO: 4994 - RNA, 75 nt, synthetic construct
  source 1..75: mol_type = other RNA
gttccagccaccggcccagggcaatgaacacaaagagcatggggggcgtgtcgaagaatgtcacaggggacctct

SEQ ID NO: 4995 - RNA, 75 nt, synthetic construct
  source 1..75: mol_type = other RNA
gttccagccaccggcccagggcaatgaacacaaagagcatggggggcgtgtcgaagaatgtcacaggtgaacgct

SEQ ID NO: 4996 - RNA, 76 nt, synthetic construct
  source 1..76: mol_type = other RNA
tgttccagccaccggcccagggcaatgaacacaaagagcatggggggcgtgtcgaagaatgtcacaggggatctct

SEQ ID NO: 4997 - RNA, 76 nt, synthetic construct
  source 1..76: mol_type = other RNA
tgttccagccaccggcccagggcaatgaacacaaagagcatggggggcgtgtcgaagaatgtcacaggagatctct

SEQ ID NO: 4998 - RNA, 76 nt, synthetic construct
  source 1..76: mol_type = other RNA
tgttccagccaccggcccagggcaatgaacacaaagagcatggggggcgtgtcgaagaatgtcacaggggagcgct

SEQ ID NO: 4999 - RNA, 76 nt, synthetic construct
  source 1..76: mol_type = other RNA
tgttccagccaccggcccagggcaatgaacacaaagagcatggggggcgtgtcgaagaatgtcacaggagaacgct

SEQ ID NO: 5000 - RNA, 76 nt, synthetic construct
  source 1..76: mol_type = other RNA
tgttccagccaccggcccagggcaatgaacacaaagagcatggggggcgtgtcgaagaatgtcacaggggaacgct

SEQ ID NO: 5001 - RNA, 76 nt, synthetic construct
  source 1..76: mol_type = other RNA
tgttccagccaccggcccagggcaatgaacacaaagagcatggggggcgtgtcgaagaatgtcacaggtgatcgct

SEQ ID NO: 5002 - RNA, 76 nt, synthetic construct
  source 1..76: mol_type = other RNA
tgttccagccaccggcccagggcaatgaacacaaagagcatggggggcgtgtcgaagaatgtcacagggctacgct

SEQ ID NO: 5003 - RNA, 76 nt, synthetic construct
  source 1..76: mol_type = other RNA
tgttccagccaccggcccagggcaatgaacacaaagagcatggggggcgtgtcgaagaatgtcacaggcgatcgct

SEQ ID NO: 5004 - RNA, 76 nt, synthetic construct
  source 1..76: mol_type = other RNA
tgttccagccaccggcccagggcaatgaacacaaagagcatggggggcgtgtcgaagaatgtcacagggctcctct

SEQ ID NO: 5005 - RNA, 76 nt, synthetic construct
  source 1..76: mol_type = other RNA
tgttccagccaccggcccagggcaatgaacacaaagagcatggggggcgtgtcgaagaatgtcacaggtgatctct

SEQ ID NO: 5006 - RNA, 76 nt, synthetic construct
  source 1..76: mol_type = other RNA
tgttccagccaccggcccagggcaatgaacacaaagagcatggggggcgtgtcgaagaatgtcacagggcttcgct

SEQ ID NO: 5007 - RNA, 76 nt, synthetic construct
  source 1..76: mol_type = other RNA
tgttccagccaccggcccagggcaatgaacacaaagagcatggggggcgtgtcgaagaatgtcacagggctgcgct

SEQ ID NO: 5008 - RNA, 76 nt, synthetic construct
  source 1..76: mol_type = other RNA
tgttccagccaccggcccagggcaatgaacacaaagagcatggggggcgtgtcgaagaatgtcacaggggatcgct

SEQ ID NO: 5009 - RNA, 76 nt, synthetic construct
  source 1..76: mol_type = other RNA
tgttccagccaccggcccagggcaatgaacacaaagagcatggggggcgtgtcgaagaatgtcacaggagatcgct

SEQ ID NO: 5010 - RNA, 76 nt, synthetic construct
  source 1..76: mol_type = other RNA
tgttccagccaccggcccagggcaatgaacacaaagagcatggggggcgtgtcgaagaatgtcacaggcgatctct

SEQ ID NO: 5011 - RNA, 76 nt, synthetic construct
  source 1..76: mol_type = other RNA
tgttccagccaccggcccagggcaatgaacacaaagagcatggggggcgtgtcgaagaatgtcacaggtgagcgct

SEQ ID NO: 5012 - RNA, 76 nt, synthetic construct
  source 1..76: mol_type = other RNA
tgttccagccaccggcccagggcaatgaacacaaagagcatggggggcgtgtcgaagaatgtcacaggtgacctct

SEQ ID NO: 5013 - RNA, 76 nt, synthetic construct
  source 1..76: mol_type = other RNA
tgttccagccaccggcccagggcaatgaacacaaagagcatggggggcgtgtcgaagaatgtcacaggagacctct

SEQ ID NO: 5014 - RNA, 76 nt, synthetic construct
  source 1..76: mol_type = other RNA
tgttccagccaccggcccagggcaatgaacacaaagagcatggggggcgtgtcgaagaatgtcacaggagagcgct

SEQ ID NO: 5015 - RNA, 76 nt, synthetic construct
  source 1..76: mol_type = other RNA
tgttccagccaccggcccagggcaatgaacacaaagagcatggggggcgtgtcgaagaatgtcacagggcttctct

SEQ ID NO: 5016 - RNA, 76 nt, synthetic construct
  source 1..76: mol_type = other RNA
tgttccagccaccggcccagggcaatgaacacaaagagcatggggggcgtgtcgaagaatgtcacaggcgaacgct

SEQ ID NO: 5017 - RNA, 76 nt, synthetic construct
  source 1..76: mol_type = other RNA
tgttccagccaccggcccagggcaatgaacacaaagagcatggggggcgtgtcgaagaatgtcacaggggacctct

SEQ ID NO: 5018 - RNA, 76 nt, synthetic construct
  source 1..76: mol_type = other RNA
tgttccagccaccggcccagggcaatgaacacaaagagcatggggggcgtgtcgaagaatgtcacaggcgacctct

SEQ ID NO: 5019 - RNA, 76 nt, synthetic construct
  source 1..76: mol_type = other RNA
tgttccagccaccggcccagggcaatgaacacaaagagcatggggggcgtgtcgaagaatgtcacaggtgaacgct

SEQ ID NO: 5020 - RNA, 76 nt, synthetic construct
  source 1..76: mol_type = other RNA
tgttccagccaccggcccagggcaatgaacacaaagagcatggggggcgtgtcgaagaatgtcacaggcgagcgct

SEQ ID NO: 5021 - RNA, 77 nt, synthetic construct
  source 1..77: mol_type = other RNA
gtgttccagccaccggcccagggcaatgaacacaaagagcatggggggcgtgtcgaagaatgtcacaggagatctct

SEQ ID NO: 5022 - RNA, 77 nt, synthetic construct
  source 1..77: mol_type = other RNA
gtgttccagccaccggcccagggcaatgaacacaaagagcatggggggcgtgtcgaagaatgtcacaggtgagcgct

SEQ ID NO: 5023 - RNA, 77 nt, synthetic construct
  source 1..77: mol_type = other RNA
gtgttccagccaccggcccagggcaatgaacacaaagagcatggggggcgtgtcgaagaatgtcacaggtgacctct

SEQ ID NO: 5024 - RNA, 77 nt, synthetic construct
  source 1..77: mol_type = other RNA
gtgttccagccaccggcccagggcaatgaacacaaagagcatggggggcgtgtcgaagaatgtcacagggctgcgct

SEQ ID NO: 5025 - RNA, 77 nt, synthetic construct
  source 1..77: mol_type = other RNA
gtgttccagccaccggcccagggcaatgaacacaaagagcatggggggcgtgtcgaagaatgtcacaggggagcgct

SEQ ID NO: 5026 - RNA, 77 nt, synthetic construct
  source 1..77: mol_type = other RNA
gtgttccagccaccggcccagggcaatgaacacaaagagcatggggggcgtgtcgaagaatgtcacaggtgatctct

SEQ ID NO: 5027 - RNA, 77 nt, synthetic construct
  source 1..77: mol_type = other RNA
gtgttccagccaccggcccagggcaatgaacacaaagagcatggggggcgtgtcgaagaatgtcacaggggacctct

SEQ ID NO: 5028 - RNA, 77 nt, synthetic construct
  source 1..77: mol_type = other RNA
gtgttccagccaccggcccagggcaatgaacacaaagagcatggggggcgtgtcgaagaatgtcacagggcttcgct

SEQ ID NO: 5029 - RNA, 77 nt, synthetic construct
  source 1..77: mol_type = other RNA
gtgttccagccaccggcccagggcaatgaacacaaagagcatggggggcgtgtcgaagaatgtcacaggtgaacgct

SEQ ID NO: 5030 - RNA, 77 nt, synthetic construct
  source 1..77: mol_type = other RNA
gtgttccagccaccggcccagggcaatgaacacaaagagcatggggggcgtgtcgaagaatgtcacaggcgatctct

SEQ ID NO: 5031 - RNA, 77 nt, synthetic construct
  source 1..77: mol_type = other RNA
gtgttccagccaccggcccagggcaatgaacacaaagagcatggggggcgtgtcgaagaatgtcacagggctacgct

SEQ ID NO: 5032 - RNA, 77 nt, synthetic construct
  source 1..77: mol_type = other RNA
gtgttccagccaccggcccagggcaatgaacacaaagagcatggggggcgtgtcgaagaatgtcacaggcgagcgct

SEQ ID NO: 5033 - RNA, 77 nt, synthetic construct
  source 1..77: mol_type = other RNA
gtgttccagccaccggcccagggcaatgaacacaaagagcatggggggcgtgtcgaagaatgtcacaggggaacgct

SEQ ID NO: 5034 - RNA, 77 nt, synthetic construct
  source 1..77: mol_type = other RNA
gtgttccagccaccggcccagggcaatgaacacaaagagcatggggggcgtgtcgaagaatgtcacagggcttctct

SEQ ID NO: 5035 - RNA, 77 nt, synthetic construct
  source 1..77: mol_type = other RNA
gtgttccagccaccggcccagggcaatgaacacaaagagcatggggggcgtgtcgaagaatgtcacaggcgaacgct

SEQ ID NO: 5036 - RNA, 77 nt, synthetic construct
  source 1..77: mol_type = other RNA
gtgttccagccaccggcccagggcaatgaacacaaagagcatggggggcgtgtcgaagaatgtcacaggcgatcgct

SEQ ID NO: 5037 - RNA, 77 nt, synthetic construct
  source 1..77: mol_type = other RNA
gtgttccagccaccggcccagggcaatgaacacaaagagcatggggggcgtgtcgaagaatgtcacaggagatcgct

SEQ ID NO: 5038 - RNA, 77 nt, synthetic construct
  source 1..77: mol_type = other RNA
gtgttccagccaccggcccagggcaatgaacacaaagagcatggggggcgtgtcgaagaatgtcacaggagaacgct

SEQ ID NO: 5039 - RNA, 77 nt, synthetic construct
  source 1..77: mol_type = other RNA
gtgttccagccaccggcccagggcaatgaacacaaagagcatggggggcgtgtcgaagaatgtcacaggggatctct

SEQ ID NO: 5040 - RNA, 77 nt, synthetic construct
  source 1..77: mol_type = other RNA
gtgttccagccaccggcccagggcaatgaacacaaagagcatggggggcgtgtcgaagaatgtcacaggagagcgct

SEQ ID NO: 5041 - RNA, 77 nt, synthetic construct
  source 1..77: mol_type = other RNA
gtgttccagccaccggcccagggcaatgaacacaaagagcatggggggcgtgtcgaagaatgtcacaggggatcgct

SEQ ID NO: 5042 - RNA, 77 nt, synthetic construct
  source 1..77: mol_type = other RNA
gtgttccagccaccggcccagggcaatgaacacaaagagcatggggggcgtgtcgaagaatgtcacagggctcctct

SEQ ID NO: 5043 - RNA, 77 nt, synthetic construct
  source 1..77: mol_type = other RNA
gtgttccagccaccggcccagggcaatgaacacaaagagcatggggggcgtgtcgaagaatgtcacaggcgacctct

SEQ ID NO: 5044 - RNA, 77 nt, synthetic construct
  source 1..77: mol_type = other RNA
gtgttccagccaccggcccagggcaatgaacacaaagagcatggggggcgtgtcgaagaatgtcacaggagacctct

SEQ ID NO: 5045 - RNA, 77 nt, synthetic construct
  source 1..77: mol_type = other RNA
gtgttccagccaccggcccagggcaatgaacacaaagagcatggggggcgtgtcgaagaatgtcacaggtgatcgct

SEQ ID NO: 5046 - RNA, 78 nt, synthetic construct
  source 1..78: mol_type = other RNA
agtgttccagccaccggcccagggcaatgaacacaaagagcatggggggcgtgtcgaagaatgtcacaggggatcgct

SEQ ID NO: 5047 - RNA, 78 nt, synthetic construct
  source 1..78: mol_type = other RNA
agtgttccagccaccggcccagggcaatgaacacaaagagcatggggggcgtgtcgaagaatgtcacaggagaacgct

SEQ ID NO: 5048 - RNA, 78 nt, synthetic construct
  source 1..78: mol_type = other RNA
agtgttccagccaccggcccagggcaatgaacacaaagagcatggggggcgtgtcgaagaatgtcacaggtgaacgct

SEQ ID NO: 5049 - RNA, 78 nt, synthetic construct
  source 1..78: mol_type = other RNA
agtgttccagccaccggcccagggcaatgaacacaaagagcatggggggcgtgtcgaagaatgtcacaggggatctct

SEQ ID NO: 5050 - RNA, 78 nt, synthetic construct
  source 1..78: mol_type = other RNA
agtgttccagccaccggcccagggcaatgaacacaaagagcatggggggcgtgtcgaagaatgtcacagggctacgct

SEQ ID NO: 5051 - RNA, 78 nt, synthetic construct
  source 1..78: mol_type = other RNA
agtgttccagccaccggcccagggcaatgaacacaaagagcatggggggcgtgtcgaagaatgtcacaggagatctct

SEQ ID NO: 5052 - RNA, 78 nt, synthetic construct
  source 1..78: mol_type = other RNA
agtgttccagccaccggcccagggcaatgaacacaaagagcatggggggcgtgtcgaagaatgtcacagggcttctct

SEQ ID NO: 5053 - RNA, 78 nt, synthetic construct
  source 1..78: mol_type = other RNA
agtgttccagccaccggcccagggcaatgaacacaaagagcatggggggcgtgtcgaagaatgtcacaggcgacctct

SEQ ID NO: 5054 - RNA, 78 nt, synthetic construct
  source 1..78: mol_type = other RNA
agtgttccagccaccggcccagggcaatgaacacaaagagcatggggggcgtgtcgaagaatgtcacaggtgagcgct

SEQ ID NO: 5055 - RNA, 78 nt, synthetic construct
  source 1..78: mol_type = other RNA
agtgttccagccaccggcccagggcaatgaacacaaagagcatggggggcgtgtcgaagaatgtcacaggcgatctct

SEQ ID NO: 5056 - RNA, 78 nt, synthetic construct
  source 1..78: mol_type = other RNA
agtgttccagccaccggcccagggcaatgaacacaaagagcatggggggcgtgtcgaagaatgtcacagggctcctct

SEQ ID NO: 5057 - RNA, 78 nt, synthetic construct
  source 1..78: mol_type = other RNA
agtgttccagccaccggcccagggcaatgaacacaaagagcatggggggcgtgtcgaagaatgtcacagggcttcgct

SEQ ID NO: 5058 - RNA, 78 nt, synthetic construct
  source 1..78: mol_type = other RNA
agtgttccagccaccggcccagggcaatgaacacaaagagcatggggggcgtgtcgaagaatgtcacaggagagcgct

SEQ ID NO: 5059 - RNA, 78 nt, synthetic construct
  source 1..78: mol_type = other RNA
agtgttccagccaccggcccagggcaatgaacacaaagagcatggggggcgtgtcgaagaatgtcacaggagacctct

SEQ ID NO: 5060 - RNA, 78 nt, synthetic construct
  source 1..78: mol_type = other RNA
agtgttccagccaccggcccagggcaatgaacacaaagagcatggggggcgtgtcgaagaatgtcacaggggaacgct

SEQ ID NO: 5061 - RNA, 78 nt, synthetic construct
  source 1..78: mol_type = other RNA
agtgttccagccaccggcccagggcaatgaacacaaagagcatggggggcgtgtcgaagaatgtcacaggagatcgct

SEQ ID NO: 5062 - RNA, 78 nt, synthetic construct
  source 1..78: mol_type = other RNA
agtgttccagccaccggcccagggcaatgaacacaaagagcatggggggcgtgtcgaagaatgtcacaggtgacctct

SEQ ID NO: 5063 - RNA, 78 nt, synthetic construct
  source 1..78: mol_type = other RNA
agtgttccagccaccggcccagggcaatgaacacaaagagcatggggggcgtgtcgaagaatgtcacaggggacctct

SEQ ID NO: 5064 - RNA, 78 nt, synthetic construct
  source 1..78: mol_type = other RNA
agtgttccagccaccggcccagggcaatgaacacaaagagcatggggggcgtgtcgaagaatgtcacaggtgatcgct

SEQ ID NO: 5065 - RNA, 78 nt, synthetic construct
  source 1..78: mol_type = other RNA
agtgttccagccaccggcccagggcaatgaacacaaagagcatggggggcgtgtcgaagaatgtcacaggggagcgct

SEQ ID NO: 5066 - RNA, 78 nt, synthetic construct
  source 1..78: mol_type = other RNA
agtgttccagccaccggcccagggcaatgaacacaaagagcatggggggcgtgtcgaagaatgtcacaggcgaacgct

SEQ ID NO: 5067 - RNA, 78 nt, synthetic construct
  source 1..78: mol_type = other RNA
agtgttccagccaccggcccagggcaatgaacacaaagagcatggggggcgtgtcgaagaatgtcacaggtgatctct

SEQ ID NO: 5068 - RNA, 78 nt, synthetic construct
  source 1..78: mol_type = other RNA
agtgttccagccaccggcccagggcaatgaacacaaagagcatggggggcgtgtcgaagaatgtcacaggcgagcgct

SEQ ID NO: 5069 - RNA, 78 nt, synthetic construct
  source 1..78: mol_type = other RNA
agtgttccagccaccggcccagggcaatgaacacaaagagcatggggggcgtgtcgaagaatgtcacagggctgcgct

SEQ ID NO: 5070 - RNA, 78 nt, synthetic construct
  source 1..78: mol_type = other RNA
agtgttccagccaccggcccagggcaatgaacacaaagagcatggggggcgtgtcgaagaatgtcacaggcgatcgct

SEQ ID NO: 5071 - RNA, 79 nt, synthetic construct
  source 1..79: mol_type = other RNA
aagtgttccagccaccggcccagggcaatgaacacaaagagcatggggggcgtgtcgaagaatgtcacaggggaacgct

SEQ ID NO: 5072 - RNA, 79 nt, synthetic construct
  source 1..79: mol_type = other RNA
aagtgttccagccaccggcccagggcaatgaacacaaagagcatggggggcgtgtcgaagaatgtcacaggcgaacgct

SEQ ID NO: 5073 - RNA, 79 nt, synthetic construct
  source 1..79: mol_type = other RNA
aagtgttccagccaccggcccagggcaatgaacacaaagagcatggggggcgtgtcgaagaatgtcacaggagaacgct

SEQ ID NO: 5074 - RNA, 79 nt, synthetic construct
  source 1..79: mol_type = other RNA
aagtgttccagccaccggcccagggcaatgaacacaaagagcatggggggcgtgtcgaagaatgtcacaggtgacctct

SEQ ID NO: 5075 - RNA, 79 nt, synthetic construct
  source 1..79: mol_type = other RNA
aagtgttccagccaccggcccagggcaatgaacacaaagagcatggggggcgtgtcgaagaatgtcacaggagagcgct

SEQ ID NO: 5076 - RNA, 79 nt, synthetic construct
  source 1..79: mol_type = other RNA
aagtgttccagccaccggcccagggcaatgaacacaaagagcatggggggcgtgtcgaagaatgtcacaggagatctct

SEQ ID NO: 5077 - RNA, 79 nt, synthetic construct
  source 1..79: mol_type = other RNA
aagtgttccagccaccggcccagggcaatgaacacaaagagcatggggggcgtgtcgaagaatgtcacagggctcctct

SEQ ID NO: 5078 - RNA, 79 nt, synthetic construct
  source 1..79: mol_type = other RNA
aagtgttccagccaccggcccagggcaatgaacacaaagagcatggggggcgtgtcgaagaatgtcacaggggatcgct

SEQ ID NO: 5079 - RNA, 79 nt, synthetic construct
  source 1..79: mol_type = other RNA
aagtgttccagccaccggcccagggcaatgaacacaaagagcatggggggcgtgtcgaagaatgtcacaggcgatcgct

SEQ ID NO: 5080 - RNA, 79 nt, synthetic construct
  source 1..79: mol_type = other RNA
aagtgttccagccaccggcccagggcaatgaacacaaagagcatggggggcgtgtcgaagaatgtcacaggggatctct

SEQ ID NO: 5081 - RNA, 79 nt, synthetic construct
  source 1..79: mol_type = other RNA
aagtgttccagccaccggcccagggcaatgaacacaaagagcatggggggcgtgtcgaagaatgtcacagggcttctct

SEQ ID NO: 5082 - RNA, 79 nt, synthetic construct
  source 1..79: mol_type = other RNA
aagtgttccagccaccggcccagggcaatgaacacaaagagcatggggggcgtgtcgaagaatgtcacagggctacgct

SEQ ID NO: 5083 - RNA, 79 nt, synthetic construct
  source 1..79: mol_type = other RNA
aagtgttccagccaccggcccagggcaatgaacacaaagagcatggggggcgtgtcgaagaatgtcacaggtgatcgct

SEQ ID NO: 5084 - RNA, 79 nt, synthetic construct
  source 1..79: mol_type = other RNA
aagtgttccagccaccggcccagggcaatgaacacaaagagcatggggggcgtgtcgaagaatgtcacaggggacctct

SEQ ID NO: 5085 - RNA, 79 nt, synthetic construct
  source 1..79: mol_type = other RNA
aagtgttccagccaccggcccagggcaatgaacacaaagagcatggggggcgtgtcgaagaatgtcacagggcttcgct

SEQ ID NO: 5086 - RNA, 79 nt, synthetic construct
  source 1..79: mol_type = other RNA
aagtgttccagccaccggcccagggcaatgaacacaaagagcatggggggcgtgtcgaagaatgtcacaggagacctct

SEQ ID NO: 5087 - RNA, 79 nt, synthetic construct
  source 1..79: mol_type = other RNA
aagtgttccagccaccggcccagggcaatgaacacaaagagcatggggggcgtgtcgaagaatgtcacaggagatcgct

SEQ ID NO: 5088 - RNA, 79 nt, synthetic construct
  source 1..79: mol_type = other RNA
aagtgttccagccaccggcccagggcaatgaacacaaagagcatggggggcgtgtcgaagaatgtcacaggtgaacgct

SEQ ID NO: 5089 - RNA, 79 nt, synthetic construct
  source 1..79: mol_type = other RNA
aagtgttccagccaccggcccagggcaatgaacacaaagagcatggggggcgtgtcgaagaatgtcacaggtgagcgct

SEQ ID NO: 5090 - RNA, 79 nt, synthetic construct
  source 1..79: mol_type = other RNA
aagtgttccagccaccggcccagggcaatgaacacaaagagcatggggggcgtgtcgaagaatgtcacaggtgatctct

SEQ ID NO: 5091 - RNA, 79 nt, synthetic construct
  source 1..79: mol_type = other RNA
aagtgttccagccaccggcccagggcaatgaacacaaagagcatggggggcgtgtcgaagaatgtcacaggcgatctct

SEQ ID NO: 5092 - RNA, 79 nt, synthetic construct
  source 1..79: mol_type = other RNA
aagtgttccagccaccggcccagggcaatgaacacaaagagcatggggggcgtgtcgaagaatgtcacaggcgacctct

SEQ ID NO: 5093 - RNA, 79 nt, synthetic construct
  source 1..79: mol_type = other RNA
aagtgttccagccaccggcccagggcaatgaacacaaagagcatggggggcgtgtcgaagaatgtcacaggcgagcgct

SEQ ID NO: 5094 - RNA, 79 nt, synthetic construct
  source 1..79: mol_type = other RNA
aagtgttccagccaccggcccagggcaatgaacacaaagagcatggggggcgtgtcgaagaatgtcacaggggagcgct

SEQ ID NO: 5095 - RNA, 79 nt, synthetic construct
  source 1..79: mol_type = other RNA
aagtgttccagccaccggcccagggcaatgaacacaaagagcatggggggcgtgtcgaagaatgtcacagggctgcgct

SEQ ID NO: 5096 - RNA, 80 nt, synthetic construct
  source 1..80: mol_type = other RNA
caagtgttccagccaccggcccagggcaatgaacacaaagagcatggggggcgtgtcgaagaatgtcacaggcgaacgct

SEQ ID NO: 5097 - RNA, 80 nt, synthetic construct
  source 1..80: mol_type = other RNA
caagtgttccagccaccggcccagggcaatgaacacaaagagcatggggggcgtgtcgaagaatgtcacaggcgagcgct

SEQ ID NO: 5098 - RNA, 80 nt, synthetic construct
  source 1..80: mol_type = other RNA
caagtgttccagccaccggcccagggcaatgaacacaaagagcatggggggcgtgtcgaagaatgtcacaggggagcgct

SEQ ID NO: 5099 - RNA, 80 nt, synthetic construct
  source 1..80: mol_type = other RNA
caagtgttccagccaccggcccagggcaatgaacacaaagagcatggggggcgtgtcgaagaatgtcacaggagaacgct

SEQ ID NO: 5100 - RNA, 80 nt, synthetic construct
  source 1..80: mol_type = other RNA
caagtgttccagccaccggcccagggcaatgaacacaaagagcatggggggcgtgtcgaagaatgtcacagggctcctct

SEQ ID NO: 5101 - RNA, 80 nt, synthetic construct
  source 1..80: mol_type = other RNA
caagtgttccagccaccggcccagggcaatgaacacaaagagcatggggggcgtgtcgaagaatgtcacaggggatcgct

SEQ ID NO: 5102 - RNA, 80 nt, synthetic construct
  source 1..80: mol_type = other RNA
caagtgttccagccaccggcccagggcaatgaacacaaagagcatggggggcgtgtcgaagaatgtcacaggtgacctct

SEQ ID NO: 5103 - RNA, 80 nt, synthetic construct
  source 1..80: mol_type = other RNA
caagtgttccagccaccggcccagggcaatgaacacaaagagcatggggggcgtgtcgaagaatgtcacagggctgcgct

SEQ ID NO: 5104 - RNA, 80 nt, synthetic construct
  source 1..80: mol_type = other RNA
caagtgttccagccaccggcccagggcaatgaacacaaagagcatggggggcgtgtcgaagaatgtcacaggagatcgct

SEQ ID NO: 5105 - RNA, 80 nt, synthetic construct
  source 1..80: mol_type = other RNA
caagtgttccagccaccggcccagggcaatgaacacaaagagcatggggggcgtgtcgaagaatgtcacagggcttctct

SEQ ID NO: 5106 - RNA, 80 nt, synthetic construct
  source 1..80: mol_type = other RNA
caagtgttccagccaccggcccagggcaatgaacacaaagagcatggggggcgtgtcgaagaatgtcacagggctacgct

SEQ ID NO: 5107 - RNA, 80 nt, synthetic construct
  source 1..80: mol_type = other RNA
caagtgttccagccaccggcccagggcaatgaacacaaagagcatggggggcgtgtcgaagaatgtcacaggtgatcgct

SEQ ID NO: 5108 - RNA, 80 nt, synthetic construct
  source 1..80: mol_type = other RNA
caagtgttccagccaccggcccagggcaatgaacacaaagagcatggggggcgtgtcgaagaatgtcacaggcgatcgct

SEQ ID NO: 5109 - RNA, 80 nt, synthetic construct
  source 1..80: mol_type = other RNA
caagtgttccagccaccggcccagggcaatgaacacaaagagcatggggggcgtgtcgaagaatgtcacaggcgatctct

SEQ ID NO: 5110 - RNA, 80 nt, synthetic construct
  source 1..80: mol_type = other RNA
caagtgttccagccaccggcccagggcaatgaacacaaagagcatggggggcgtgtcgaagaatgtcacaggggaacgct

SEQ ID NO: 5111 - RNA, 80 nt, synthetic construct
  source 1..80: mol_type = other RNA
caagtgttccagccaccggcccagggcaatgaacacaaagagcatggggggcgtgtcgaagaatgtcacaggcgacctct

SEQ ID NO: 5112 - RNA, 80 nt, synthetic construct
  source 1..80: mol_type = other RNA
caagtgttccagccaccggcccagggcaatgaacacaaagagcatggggggcgtgtcgaagaatgtcacaggtgatctct

SEQ ID NO: 5113 - RNA, 80 nt, synthetic construct
  source 1..80: mol_type = other RNA
caagtgttccagccaccggcccagggcaatgaacacaaagagcatggggggcgtgtcgaagaatgtcacaggagacctct

SEQ ID NO: 5114 - RNA, 80 nt, synthetic construct
  source 1..80: mol_type = other RNA
caagtgttccagccaccggcccagggcaatgaacacaaagagcatggggggcgtgtcgaagaatgtcacaggagagcgct

SEQ ID NO: 5115 - RNA, 80 nt, synthetic construct
  source 1..80: mol_type = other RNA
caagtgttccagccaccggcccagggcaatgaacacaaagagcatggggggcgtgtcgaagaatgtcacaggtgaacgct

SEQ ID NO: 5116 - RNA, 80 nt, synthetic construct
  source 1..80: mol_type = other RNA
caagtgttccagccaccggcccagggcaatgaacacaaagagcatggggggcgtgtcgaagaatgtcacagggcttcgct

SEQ ID NO: 5117 - RNA, 80 nt, synthetic construct
  source 1..80: mol_type = other RNA
caagtgttccagccaccggcccagggcaatgaacacaaagagcatggggggcgtgtcgaagaatgtcacaggggatctct

SEQ ID NO: 5118 - RNA, 80 nt, synthetic construct
  source 1..80: mol_type = other RNA
caagtgttccagccaccggcccagggcaatgaacacaaagagcatggggggcgtgtcgaagaatgtcacaggggacctct

SEQ ID NO: 5119 - RNA, 80 nt, synthetic construct
  source 1..80: mol_type = other RNA
caagtgttccagccaccggcccagggcaatgaacacaaagagcatggggggcgtgtcgaagaatgtcacaggagatctct

SEQ ID NO: 5120 - RNA, 80 nt, synthetic construct
  source 1..80: mol_type = other RNA
caagtgttccagccaccggcccagggcaatgaacacaaagagcatggggggcgtgtcgaagaatgtcacaggtgagcgct

SEQ ID NO: 5121 - RNA, 81 nt, synthetic construct
  source 1..81: mol_type = other RNA
ccaagtgttccagccaccggcccagggcaatgaacacaaagagcatggggggcgtgtcgaagaatgtcacaggtgacctct

SEQ ID NO: 5122 - RNA, 81 nt, synthetic construct
  source 1..81: mol_type = other RNA
ccaagtgttccagccaccggcccagggcaatgaacacaaagagcatggggggcgtgtcgaagaatgtcacaggggatctct

SEQ ID NO: 5123 - RNA, 81 nt, synthetic construct
  source 1..81: mol_type = other RNA
ccaagtgttccagccaccggcccagggcaatgaacacaaagagcatggggggcgtgtcgaagaatgtcacaggggagcgct

SEQ ID NO: 5124 - RNA, 81 nt, synthetic construct
  source 1..81: mol_type = other RNA
ccaagtgttccagccaccggcccagggcaatgaacacaaagagcatggggggcgtgtcgaagaatgtcacaggcgatcgct

SEQ ID NO: 5125 - RNA, 81 nt, synthetic construct
  source 1..81: mol_type = other RNA
ccaagtgttccagccaccggcccagggcaatgaacacaaagagcatggggggcgtgtcgaagaatgtcacagggctacgct

SEQ ID NO: 5126 - RNA, 81 nt, synthetic construct
  source 1..81: mol_type = other RNA
ccaagtgttccagccaccggcccagggcaatgaacacaaagagcatggggggcgtgtcgaagaatgtcacaggtgagcgct

SEQ ID NO: 5127 - RNA, 81 nt, synthetic construct
  source 1..81: mol_type = other RNA
ccaagtgttccagccaccggcccagggcaatgaacacaaagagcatggggggcgtgtcgaagaatgtcacaggagagcgct

SEQ ID NO: 5128 - RNA, 81 nt, synthetic construct
  source 1..81: mol_type = other RNA
ccaagtgttccagccaccggcccagggcaatgaacacaaagagcatggggggcgtgtcgaagaatgtcacaggtgatctct

SEQ ID NO: 5129 - RNA, 81 nt, synthetic construct
  source 1..81: mol_type = other RNA
ccaagtgttccagccaccggcccagggcaatgaacacaaagagcatggggggcgtgtcgaagaatgtcacaggagatctct

SEQ ID NO: 5130 - RNA, 81 nt, synthetic construct
  source 1..81: mol_type = other RNA
ccaagtgttccagccaccggcccagggcaatgaacacaaagagcatggggggcgtgtcgaagaatgtcacaggagacctct

SEQ ID NO: 5131 - RNA, 81 nt, synthetic construct
  source 1..81: mol_type = other RNA
ccaagtgttccagccaccggcccagggcaatgaacacaaagagcatggggggcgtgtcgaagaatgtcacaggcgaacgct

SEQ ID NO: 5132 - RNA, 81 nt, synthetic construct
  source 1..81: mol_type = other RNA
ccaagtgttccagccaccggcccagggcaatgaacacaaagagcatggggggcgtgtcgaagaatgtcacagggcttctct

SEQ ID NO: 5133 - RNA, 81 nt, synthetic construct
  source 1..81: mol_type = other RNA
ccaagtgttccagccaccggcccagggcaatgaacacaaagagcatggggggcgtgtcgaagaatgtcacaggcgacctct

SEQ ID NO: 5134 - RNA, 81 nt, synthetic construct
  source 1..81: mol_type = other RNA
ccaagtgttccagccaccggcccagggcaatgaacacaaagagcatggggggcgtgtcgaagaatgtcacagggctcctct

SEQ ID NO: 5135 - RNA, 81 nt, synthetic construct
  source 1..81: mol_type = other RNA
ccaagtgttccagccaccggcccagggcaatgaacacaaagagcatggggggcgtgtcgaagaatgtcacaggggaacgct

SEQ ID NO: 5136 - RNA, 81 nt, synthetic construct
  source 1..81: mol_type = other RNA
ccaagtgttccagccaccggcccagggcaatgaacacaaagagcatggggggcgtgtcgaagaatgtcacaggagaacgct

SEQ ID NO: 5137 - RNA, 81 nt, synthetic construct
  source 1..81: mol_type = other RNA
ccaagtgttccagccaccggcccagggcaatgaacacaaagagcatggggggcgtgtcgaagaatgtcacagggctgcgct

SEQ ID NO: 5138 - RNA, 81 nt, synthetic construct
  source 1..81: mol_type = other RNA
ccaagtgttccagccaccggcccagggcaatgaacacaaagagcatggggggcgtgtcgaagaatgtcacaggagatcgct

SEQ ID NO: 5139 - RNA, 81 nt, synthetic construct
  source 1..81: mol_type = other RNA
ccaagtgttccagccaccggcccagggcaatgaacacaaagagcatggggggcgtgtcgaagaatgtcacaggcgatctct

SEQ ID NO: 5140 - RNA, 81 nt, synthetic construct
  source 1..81: mol_type = other RNA
ccaagtgttccagccaccggcccagggcaatgaacacaaagagcatggggggcgtgtcgaagaatgtcacaggtgaacgct

SEQ ID NO: 5141 - RNA, 81 nt, synthetic construct
  source 1..81: mol_type = other RNA
ccaagtgttccagccaccggcccagggcaatgaacacaaagagcatggggggcgtgtcgaagaatgtcacaggtgatcgct

SEQ ID NO: 5142 - RNA, 81 nt, synthetic construct
  source 1..81: mol_type = other RNA
ccaagtgttccagccaccggcccagggcaatgaacacaaagagcatggggggcgtgtcgaagaatgtcacaggggacctct

SEQ ID NO: 5143 - RNA, 81 nt, synthetic construct
  source 1..81: mol_type = other RNA
ccaagtgttccagccaccggcccagggcaatgaacacaaagagcatggggggcgtgtcgaagaatgtcacaggcgagcgct

SEQ ID NO: 5144 - RNA, 81 nt, synthetic construct
  source 1..81: mol_type = other RNA
ccaagtgttccagccaccggcccagggcaatgaacacaaagagcatggggggcgtgtcgaagaatgtcacaggggatcgct

SEQ ID NO: 5145 - RNA, 81 nt, synthetic construct
  source 1..81: mol_type = other RNA
ccaagtgttccagccaccggcccagggcaatgaacacaaagagcatggggggcgtgtcgaagaatgtcacagggcttcgct

SEQ ID NO: 5146 - RNA, 82 nt, synthetic construct
  source 1..82: mol_type = other RNA
gccaagtgttccagccaccggcccagggcaatgaacacaaagagcatggggggcgtgtcgaagaatgtcacaggggaacgct

SEQ ID NO: 5147 - RNA, 82 nt, synthetic construct
  source 1..82: mol_type = other RNA
gccaagtgttccagccaccggcccagggcaatgaacacaaagagcatggggggcgtgtcgaagaatgtcacaggcgatctct

SEQ ID NO: 5148 - RNA, 82 nt, synthetic construct
  source 1..82: mol_type = other RNA
gccaagtgttccagccaccggcccagggcaatgaacacaaagagcatggggggcgtgtcgaagaatgtcacaggagagcgct

SEQ ID NO: 5149 - RNA, 82 nt, synthetic construct
  source 1..82: mol_type = other RNA
gccaagtgttccagccaccggcccagggcaatgaacacaaagagcatggggggcgtgtcgaagaatgtcacaggtgagcgct

SEQ ID NO: 5150 - RNA, 82 nt, synthetic construct
  source 1..82: mol_type = other RNA
gccaagtgttccagccaccggcccagggcaatgaacacaaagagcatggggggcgtgtcgaagaatgtcacaggggacctct

SEQ ID NO: 5151 - RNA, 82 nt, synthetic construct
  source 1..82: mol_type = other RNA
gccaagtgttccagccaccggcccagggcaatgaacacaaagagcatggggggcgtgtcgaagaatgtcacaggcgacctct

SEQ ID NO: 5152 - RNA, 82 nt, synthetic construct
  source 1..82: mol_type = other RNA
gccaagtgttccagccaccggcccagggcaatgaacacaaagagcatggggggcgtgtcgaagaatgtcacaggagatcgct

SEQ ID NO: 5153 - RNA, 82 nt, synthetic construct
  source 1..82: mol_type = other RNA
gccaagtgttccagccaccggcccagggcaatgaacacaaagagcatggggggcgtgtcgaagaatgtcacagggcttcgct

SEQ ID NO: 5154 - RNA, 82 nt, synthetic construct
  source 1..82: mol_type = other RNA
gccaagtgttccagccaccggcccagggcaatgaacacaaagagcatggggggcgtgtcgaagaatgtcacaggcgagcgct

SEQ ID NO: 5155 - RNA, 82 nt, synthetic construct
  source 1..82: mol_type = other RNA
gccaagtgttccagccaccggcccagggcaatgaacacaaagagcatggggggcgtgtcgaagaatgtcacagggctcctct

SEQ ID NO: 5156 - RNA, 82 nt, synthetic construct
  source 1..82: mol_type = other RNA
gccaagtgttccagccaccggcccagggcaatgaacacaaagagcatggggggcgtgtcgaagaatgtcacaggagatctct

SEQ ID NO: 5157 - RNA, 82 nt, synthetic construct
  source 1..82: mol_type = other RNA
gccaagtgttccagccaccggcccagggcaatgaacacaaagagcatggggggcgtgtcgaagaatgtcacaggagacctct

SEQ ID NO: 5158 - RNA, 82 nt, synthetic construct
  source 1..82: mol_type = other RNA
gccaagtgttccagccaccggcccagggcaatgaacacaaagagcatggggggcgtgtcgaagaatgtcacagggctgcgct

SEQ ID NO: 5159 - RNA, 82 nt, synthetic construct
  source 1..82: mol_type = other RNA
gccaagtgttccagccaccggcccagggcaatgaacacaaagagcatggggggcgtgtcgaagaatgtcacaggtgacctct

SEQ ID NO: 5160 - RNA, 82 nt, synthetic construct
  source 1..82: mol_type = other RNA
gccaagtgttccagccaccggcccagggcaatgaacacaaagagcatggggggcgtgtcgaagaatgtcacaggagaacgct

SEQ ID NO: 5161 - RNA, 82 nt, synthetic construct
  source 1..82: mol_type = other RNA
gccaagtgttccagccaccggcccagggcaatgaacacaaagagcatggggggcgtgtcgaagaatgtcacaggtgatctct

SEQ ID NO: 5162 - RNA, 82 nt, synthetic construct
  source 1..82: mol_type = other RNA
gccaagtgttccagccaccggcccagggcaatgaacacaaagagcatggggggcgtgtcgaagaatgtcacagggcttctct

SEQ ID NO: 5163 - RNA, 82 nt, synthetic construct
  source 1..82: mol_type = other RNA
gccaagtgttccagccaccggcccagggcaatgaacacaaagagcatggggggcgtgtcgaagaatgtcacaggcgaacgct

SEQ ID NO: 5164 - RNA, 82 nt, synthetic construct
  source 1..82: mol_type = other RNA
gccaagtgttccagccaccggcccagggcaatgaacacaaagagcatggggggcgtgtcgaagaatgtcacaggcgatcgct

SEQ ID NO: 5165 - RNA, 82 nt, synthetic construct
  source 1..82: mol_type = other RNA
gccaagtgttccagccaccggcccagggcaatgaacacaaagagcatggggggcgtgtcgaagaatgtcacaggggatctct

SEQ ID NO: 5166 - RNA, 82 nt, synthetic construct
  source 1..82: mol_type = other RNA
gccaagtgttccagccaccggcccagggcaatgaacacaaagagcatggggggcgtgtcgaagaatgtcacagggctacgct

SEQ ID NO: 5167 - RNA, 82 nt, synthetic construct
  source 1..82: mol_type = other RNA
gccaagtgttccagccaccggcccagggcaatgaacacaaagagcatggggggcgtgtcgaagaatgtcacaggtgatcgct

SEQ ID NO: 5168 - RNA, 82 nt, synthetic construct
  source 1..82: mol_type = other RNA
gccaagtgttccagccaccggcccagggcaatgaacacaaagagcatggggggcgtgtcgaagaatgtcacaggtgaacgct

SEQ ID NO: 5169 - RNA, 82 nt, synthetic construct
  source 1..82: mol_type = other RNA
gccaagtgttccagccaccggcccagggcaatgaacacaaagagcatggggggcgtgtcgaagaatgtcacaggggagcgct

SEQ ID NO: 5170 - RNA, 82 nt, synthetic construct
  source 1..82: mol_type = other RNA
gccaagtgttccagccaccggcccagggcaatgaacacaaagagcatggggggcgtgtcgaagaatgtcacaggggatcgct

SEQ ID NO: 5171 - RNA, 83 nt, synthetic construct
  source 1..83: mol_type = other RNA
tgccaagtgttccagccaccggcccagggcaatgaacacaaagagcatggggggcgtgtcgaagaatgtcacaggggatcgct

SEQ ID NO: 5172 - RNA, 83 nt, synthetic construct
  source 1..83: mol_type = other RNA
tgccaagtgttccagccaccggcccagggcaatgaacacaaagagcatggggggcgtgtcgaagaatgtcacaggagagcgct

SEQ ID NO: 5173 - RNA, 83 nt, synthetic construct
  source 1..83: mol_type = other RNA
tgccaagtgttccagccaccggcccagggcaatgaacacaaagagcatggggggcgtgtcgaagaatgtcacaggcgatctct

SEQ ID NO: 5174 - RNA, 83 nt, synthetic construct
  source 1..83: mol_type = other RNA
tgccaagtgttccagccaccggcccagggcaatgaacacaaagagcatggggggcgtgtcgaagaatgtcacagggcttcgct

SEQ ID NO: 5175 - RNA, 83 nt, synthetic construct
  source 1..83: mol_type = other RNA
tgccaagtgttccagccaccggcccagggcaatgaacacaaagagcatggggggcgtgtcgaagaatgtcacaggtgatcgct

SEQ ID NO: 5176 - RNA, 83 nt, synthetic construct
  source 1..83: mol_type = other RNA
tgccaagtgttccagccaccggcccagggcaatgaacacaaagagcatggggggcgtgtcgaagaatgtcacaggagacctct

SEQ ID NO: 5177 - RNA, 83 nt, synthetic construct
  source 1..83: mol_type = other RNA
tgccaagtgttccagccaccggcccagggcaatgaacacaaagagcatggggggcgtgtcgaagaatgtcacaggggatctct

SEQ ID NO: 5178 - RNA, 83 nt, synthetic construct
  source 1..83: mol_type = other RNA
tgccaagtgttccagccaccggcccagggcaatgaacacaaagagcatggggggcgtgtcgaagaatgtcacaggggaacgct

SEQ ID NO: 5179 - RNA, 83 nt, synthetic construct
  source 1..83: mol_type = other RNA
tgccaagtgttccagccaccggcccagggcaatgaacacaaagagcatggggggcgtgtcgaagaatgtcacaggagatcgct

SEQ ID NO: 5180 - RNA, 83 nt, synthetic construct
  source 1..83: mol_type = other RNA
tgccaagtgttccagccaccggcccagggcaatgaacacaaagagcatggggggcgtgtcgaagaatgtcacagggctcctct

SEQ ID NO: 5181 - RNA, 83 nt, synthetic construct
  source 1..83: mol_type = other RNA
tgccaagtgttccagccaccggcccagggcaatgaacacaaagagcatggggggcgtgtcgaagaatgtcacaggtgacctct

SEQ ID NO: 5182 - RNA, 83 nt, synthetic construct
  source 1..83: mol_type = other RNA
tgccaagtgttccagccaccggcccagggcaatgaacacaaagagcatggggggcgtgtcgaagaatgtcacagggctacgct

SEQ ID NO: 5183 - RNA, 83 nt, synthetic construct
  source 1..83: mol_type = other RNA
tgccaagtgttccagccaccggcccagggcaatgaacacaaagagcatggggggcgtgtcgaagaatgtcacagggctgcgct

SEQ ID NO: 5184 - RNA, 83 nt, synthetic construct
  source 1..83: mol_type = other RNA
tgccaagtgttccagccaccggcccagggcaatgaacacaaagagcatggggggcgtgtcgaagaatgtcacaggtgaacgct

SEQ ID NO: 5185 - RNA, 83 nt, synthetic construct
  source 1..83: mol_type = other RNA
tgccaagtgttccagccaccggcccagggcaatgaacacaaagagcatggggggcgtgtcgaagaatgtcacagggcttctct

SEQ ID NO: 5186 - RNA, 83 nt, synthetic construct
  source 1..83: mol_type = other RNA
tgccaagtgttccagccaccggcccagggcaatgaacacaaagagcatggggggcgtgtcgaagaatgtcacaggagaacgct

SEQ ID NO: 5187 - RNA, 83 nt, synthetic construct
  source 1..83: mol_type = other RNA
tgccaagtgttccagccaccggcccagggcaatgaacacaaagagcatggggggcgtgtcgaagaatgtcacaggtgatctct

SEQ ID NO: 5188 - RNA, 83 nt, synthetic construct
  source 1..83: mol_type = other RNA
tgccaagtgttccagccaccggcccagggcaatgaacacaaagagcatggggggcgtgtcgaagaatgtcacaggcgacctct

SEQ ID NO: 5189 - RNA, 83 nt, synthetic construct
  source 1..83: mol_type = other RNA
tgccaagtgttccagccaccggcccagggcaatgaacacaaagagcatggggggcgtgtcgaagaatgtcacaggagatctct

SEQ ID NO: 5190 - RNA, 83 nt, synthetic construct
  source 1..83: mol_type = other RNA
tgccaagtgttccagccaccggcccagggcaatgaacacaaagagcatggggggcgtgtcgaagaatgtcacaggggacctct

SEQ ID NO: 5191 - RNA, 83 nt, synthetic construct
  source 1..83: mol_type = other RNA
tgccaagtgttccagccaccggcccagggcaatgaacacaaagagcatggggggcgtgtcgaagaatgtcacaggcgagcgct

SEQ ID NO: 5192 - RNA, 83 nt, synthetic construct
  source 1..83: mol_type = other RNA
tgccaagtgttccagccaccggcccagggcaatgaacacaaagagcatggggggcgtgtcgaagaatgtcacaggcgaacgct

SEQ ID NO: 5193 - RNA, 83 nt, synthetic construct
  source 1..83: mol_type = other RNA
tgccaagtgttccagccaccggcccagggcaatgaacacaaagagcatggggggcgtgtcgaagaatgtcacaggggagcgct

SEQ ID NO: 5194 - RNA, 83 nt, synthetic construct
  source 1..83: mol_type = other RNA
tgccaagtgttccagccaccggcccagggcaatgaacacaaagagcatggggggcgtgtcgaagaatgtcacaggtgagcgct

SEQ ID NO: 5195 - RNA, 83 nt, synthetic construct
  source 1..83: mol_type = other RNA
tgccaagtgttccagccaccggcccagggcaatgaacacaaagagcatggggggcgtgtcgaagaatgtcacaggcgatcgct

SEQ ID NO: 5196 - RNA, 84 nt, synthetic construct
  source 1..84: mol_type = other RNA
ttgccaagtgttccagccaccggcccagggcaatgaacacaaagagcatggggggcgtgtcgaagaatgtcacaggagagcgct

SEQ ID NO: 5197 - RNA, 84 nt, synthetic construct
  source 1..84: mol_type = other RNA
ttgccaagtgttccagccaccggcccagggcaatgaacacaaagagcatggggggcgtgtcgaagaatgtcacagggcttctct

SEQ ID NO: 5198 - RNA, 84 nt, synthetic construct
  source 1..84: mol_type = other RNA
ttgccaagtgttccagccaccggcccagggcaatgaacacaaagagcatggggggcgtgtcgaagaatgtcacagggctacgct

SEQ ID NO: 5199 - RNA, 84 nt, synthetic construct
  source 1..84: mol_type = other RNA
ttgccaagtgttccagccaccggcccagggcaatgaacacaaagagcatggggggcgtgtcgaagaatgtcacagggctcctct

SEQ ID NO: 5200 - RNA, 84 nt, synthetic construct
  source 1..84: mol_type = other RNA
ttgccaagtgttccagccaccggcccagggcaatgaacacaaagagcatggggggcgtgtcgaagaatgtcacaggcgatcgct

SEQ ID NO: 5201 - RNA, 84 nt, synthetic construct
  source 1..84: mol_type = other RNA
ttgccaagtgttccagccaccggcccagggcaatgaacacaaagagcatggggggcgtgtcgaagaatgtcacaggcgagcgct

SEQ ID NO: 5202 - RNA, 84 nt, synthetic construct
  source 1..84: mol_type = other RNA
ttgccaagtgttccagccaccggcccagggcaatgaacacaaagagcatggggggcgtgtcgaagaatgtcacaggagatcgct

SEQ ID NO: 5203 - RNA, 84 nt, synthetic construct
  source 1..84: mol_type = other RNA
ttgccaagtgttccagccaccggcccagggcaatgaacacaaagagcatggggggcgtgtcgaagaatgtcacaggggatcgct

SEQ ID NO: 5204 - RNA, 84 nt, synthetic construct
  source 1..84: mol_type = other RNA
ttgccaagtgttccagccaccggcccagggcaatgaacacaaagagcatggggggcgtgtcgaagaatgtcacaggcgaacgct

SEQ ID NO: 5205 - RNA, 84 nt, synthetic construct
  source 1..84: mol_type = other RNA
ttgccaagtgttccagccaccggcccagggcaatgaacacaaagagcatggggggcgtgtcgaagaatgtcacagggctgcgct

SEQ ID NO: 5206 - RNA, 84 nt, synthetic construct
  source 1..84: mol_type = other RNA
ttgccaagtgttccagccaccggcccagggcaatgaacacaaagagcatggggggcgtgtcgaagaatgtcacagggcttcgct

SEQ ID NO: 5207 - RNA, 84 nt, synthetic construct
  source 1..84: mol_type = other RNA
ttgccaagtgttccagccaccggcccagggcaatgaacacaaagagcatggggggcgtgtcgaagaatgtcacaggggatctct

SEQ ID NO: 5208 - RNA, 84 nt, synthetic construct
  source 1..84: mol_type = other RNA
ttgccaagtgttccagccaccggcccagggcaatgaacacaaagagcatggggggcgtgtcgaagaatgtcacaggggagcgct

SEQ ID NO: 5209 - RNA, 84 nt, synthetic construct
  source 1..84: mol_type = other RNA
ttgccaagtgttccagccaccggcccagggcaatgaacacaaagagcatggggggcgtgtcgaagaatgtcacaggtgacctct

SEQ ID NO: 5210 - RNA, 84 nt, synthetic construct
  source 1..84: mol_type = other RNA
ttgccaagtgttccagccaccggcccagggcaatgaacacaaagagcatggggggcgtgtcgaagaatgtcacaggcgatctct

SEQ ID NO: 5211 - RNA, 84 nt, synthetic construct
  source 1..84: mol_type = other RNA
ttgccaagtgttccagccaccggcccagggcaatgaacacaaagagcatggggggcgtgtcgaagaatgtcacaggggacctct

SEQ ID NO: 5212 - RNA, 84 nt, synthetic construct
  source 1..84: mol_type = other RNA
ttgccaagtgttccagccaccggcccagggcaatgaacacaaagagcatggggggcgtgtcgaagaatgtcacaggtgatctct

SEQ ID NO: 5213 - RNA, 84 nt, synthetic construct
  source 1..84: mol_type = other RNA
ttgccaagtgttccagccaccggcccagggcaatgaacacaaagagcatggggggcgtgtcgaagaatgtcacaggtgagcgct

SEQ ID NO: 5214 - RNA, 84 nt, synthetic construct
  source 1..84: mol_type = other RNA
ttgccaagtgttccagccaccggcccagggcaatgaacacaaagagcatggggggcgtgtcgaagaatgtcacaggtgatcgct

SEQ ID NO: 5215 - RNA, 84 nt, synthetic construct
  source 1..84: mol_type = other RNA
ttgccaagtgttccagccaccggcccagggcaatgaacacaaagagcatggggggcgtgtcgaagaatgtcacaggagacctct

SEQ ID NO: 5216 - RNA, 84 nt, synthetic construct
  source 1..84: mol_type = other RNA
ttgccaagtgttccagccaccggcccagggcaatgaacacaaagagcatggggggcgtgtcgaagaatgtcacaggtgaacgct

SEQ ID NO: 5217 - RNA, 84 nt, synthetic construct
  source 1..84: mol_type = other RNA
ttgccaagtgttccagccaccggcccagggcaatgaacacaaagagcatggggggcgtgtcgaagaatgtcacaggagatctct

SEQ ID NO: 5218 - RNA, 84 nt, synthetic construct
  source 1..84: mol_type = other RNA
ttgccaagtgttccagccaccggcccagggcaatgaacacaaagagcatggggggcgtgtcgaagaatgtcacaggggaacgct

SEQ ID NO: 5219 - RNA, 84 nt, synthetic construct
  source 1..84: mol_type = other RNA
ttgccaagtgttccagccaccggcccagggcaatgaacacaaagagcatggggggcgtgtcgaagaatgtcacaggcgacctct

SEQ ID NO: 5220 - RNA, 84 nt, synthetic construct
  source 1..84: mol_type = other RNA
ttgccaagtgttccagccaccggcccagggcaatgaacacaaagagcatggggggcgtgtcgaagaatgtcacaggagaacgct

SEQ ID NO: 5221 - RNA, 85 nt, synthetic construct
  source 1..85: mol_type = other RNA
tttgccaagtgttccagccaccggcccagggcaatgaacacaaagagcatggggggcgtgtcgaagaatgtcacaggtgaacgct

SEQ ID NO: 5222 - RNA, 85 nt, synthetic construct
  source 1..85: mol_type = other RNA
tttgccaagtgttccagccaccggcccagggcaatgaacacaaagagcatggggggcgtgtcgaagaatgtcacaggtgacctct

SEQ ID NO: 5223 - RNA, 85 nt, synthetic construct
  source 1..85: mol_type = other RNA
tttgccaagtgttccagccaccggcccagggcaatgaacacaaagagcatggggggcgtgtcgaagaatgtcacaggcgatctct

SEQ ID NO: 5224 - RNA, 85 nt, synthetic construct
  source 1..85: mol_type = other RNA
tttgccaagtgttccagccaccggcccagggcaatgaacacaaagagcatggggggcgtgtcgaagaatgtcacaggggacctct

SEQ ID NO: 5225 - RNA, 85 nt, synthetic construct
  source 1..85: mol_type = other RNA
tttgccaagtgttccagccaccggcccagggcaatgaacacaaagagcatggggggcgtgtcgaagaatgtcacaggagaacgct

SEQ ID NO: 5226 - RNA, 85 nt, synthetic construct
  source 1..85: mol_type = other RNA
tttgccaagtgttccagccaccggcccagggcaatgaacacaaagagcatggggggcgtgtcgaagaatgtcacagggcttctct

SEQ ID NO: 5227 - RNA, 85 nt, synthetic construct
  source 1..85: mol_type = other RNA
tttgccaagtgttccagccaccggcccagggcaatgaacacaaagagcatggggggcgtgtcgaagaatgtcacagggctacgct

SEQ ID NO: 5228 - RNA, 85 nt, synthetic construct
  source 1..85: mol_type = other RNA
tttgccaagtgttccagccaccggcccagggcaatgaacacaaagagcatggggggcgtgtcgaagaatgtcacagggctcctct

SEQ ID NO: 5229 - RNA, 85 nt, synthetic construct
  source 1..85: mol_type = other RNA
tttgccaagtgttccagccaccggcccagggcaatgaacacaaagagcatggggggcgtgtcgaagaatgtcacaggggagcgct

SEQ ID NO: 5230 - RNA, 85 nt, synthetic construct
  source 1..85: mol_type = other RNA
tttgccaagtgttccagccaccggcccagggcaatgaacacaaagagcatggggggcgtgtcgaagaatgtcacaggtgatcgct

SEQ ID NO: 5231 - RNA, 85 nt, synthetic construct
  source 1..85: mol_type = other RNA
tttgccaagtgttccagccaccggcccagggcaatgaacacaaagagcatggggggcgtgtcgaagaatgtcacaggggatctct

SEQ ID NO: 5232 - RNA, 85 nt, synthetic construct
  source 1..85: mol_type = other RNA
tttgccaagtgttccagccaccggcccagggcaatgaacacaaagagcatggggggcgtgtcgaagaatgtcacaggggaacgct

SEQ ID NO: 5233 - RNA, 85 nt, synthetic construct
  source 1..85: mol_type = other RNA
tttgccaagtgttccagccaccggcccagggcaatgaacacaaagagcatggggggcgtgtcgaagaatgtcacaggcgacctct

SEQ ID NO: 5234 - RNA, 85 nt, synthetic construct
  source 1..85: mol_type = other RNA
tttgccaagtgttccagccaccggcccagggcaatgaacacaaagagcatggggggcgtgtcgaagaatgtcacaggagagcgct

SEQ ID NO: 5235 - RNA, 85 nt, synthetic construct
  source 1..85: mol_type = other RNA
tttgccaagtgttccagccaccggcccagggcaatgaacacaaagagcatggggggcgtgtcgaagaatgtcacaggtgatctct

SEQ ID NO: 5236 - RNA, 85 nt, synthetic construct
  source 1..85: mol_type = other RNA
tttgccaagtgttccagccaccggcccagggcaatgaacacaaagagcatggggggcgtgtcgaagaatgtcacaggcgaacgct

SEQ ID NO: 5237 - RNA, 85 nt, synthetic construct
  source 1..85: mol_type = other RNA
tttgccaagtgttccagccaccggcccagggcaatgaacacaaagagcatggggggcgtgtcgaagaatgtcacaggtgagcgct

SEQ ID NO: 5238 - RNA, 85 nt, synthetic construct
  source 1..85: mol_type = other RNA
tttgccaagtgttccagccaccggcccagggcaatgaacacaaagagcatggggggcgtgtcgaagaatgtcacaggagatctct

SEQ ID NO: 5239 - RNA, 85 nt, synthetic construct
  source 1..85: mol_type = other RNA
tttgccaagtgttccagccaccggcccagggcaatgaacacaaagagcatggggggcgtgtcgaagaatgtcacaggcgagcgct

SEQ ID NO: 5240 - RNA, 85 nt, synthetic construct
  source 1..85: mol_type = other RNA
tttgccaagtgttccagccaccggcccagggcaatgaacacaaagagcatggggggcgtgtcgaagaatgtcacagggcttcgct

SEQ ID NO: 5241 - RNA, 85 nt, synthetic construct
  source 1..85: mol_type = other RNA
tttgccaagtgttccagccaccggcccagggcaatgaacacaaagagcatggggggcgtgtcgaagaatgtcacaggggatcgct

SEQ ID NO: 5242 - RNA, 85 nt, synthetic construct
  source 1..85: mol_type = other RNA
tttgccaagtgttccagccaccggcccagggcaatgaacacaaagagcatggggggcgtgtcgaagaatgtcacaggcgatcgct

SEQ ID NO: 5243 - RNA, 85 nt, synthetic construct
  source 1..85: mol_type = other RNA
tttgccaagtgttccagccaccggcccagggcaatgaacacaaagagcatggggggcgtgtcgaagaatgtcacagggctgcgct

SEQ ID NO: 5244 - RNA, 85 nt, synthetic construct
  source 1..85: mol_type = other RNA
tttgccaagtgttccagccaccggcccagggcaatgaacacaaagagcatggggggcgtgtcgaagaatgtcacaggagatcgct

SEQ ID NO: 5245 - RNA, 85 nt, synthetic construct
  source 1..85: mol_type = other RNA
tttgccaagtgttccagccaccggcccagggcaatgaacacaaagagcatggggggcgtgtcgaagaatgtcacaggagacctct

SEQ ID NO: 5246 - RNA, 86 nt, synthetic construct
  source 1..86: mol_type = other RNA
ctttgccaagtgttccagccaccggcccagggcaatgaacacaaagagcatggggggcgtgtcgaagaatgtcacagggctacgct

SEQ ID NO: 5247 - RNA, 86 nt, synthetic construct
  source 1..86: mol_type = other RNA
ctttgccaagtgttccagccaccggcccagggcaatgaacacaaagagcatggggggcgtgtcgaagaatgtcacaggagagcgct

SEQ ID NO: 5248 - RNA, 86 nt, synthetic construct
  source 1..86: mol_type = other RNA
ctttgccaagtgttccagccaccggcccagggcaatgaacacaaagagcatggggggcgtgtcgaagaatgtcacaggggacctct

SEQ ID NO: 5249 - RNA, 86 nt, synthetic construct
  source 1..86: mol_type = other RNA
ctttgccaagtgttccagccaccggcccagggcaatgaacacaaagagcatggggggcgtgtcgaagaatgtcacaggtgaacgct

SEQ ID NO: 5250 - RNA, 86 nt, synthetic construct
  source 1..86: mol_type = other RNA
ctttgccaagtgttccagccaccggcccagggcaatgaacacaaagagcatggggggcgtgtcgaagaatgtcacaggtgatcgct

SEQ ID NO: 5251 - RNA, 86 nt, synthetic construct
  source 1..86: mol_type = other RNA
ctttgccaagtgttccagccaccggcccagggcaatgaacacaaagagcatggggggcgtgtcgaagaatgtcacaggcgagcgct

SEQ ID NO: 5252 - RNA, 86 nt, synthetic construct
  source 1..86: mol_type = other RNA
ctttgccaagtgttccagccaccggcccagggcaatgaacacaaagagcatggggggcgtgtcgaagaatgtcacaggagaacgct

SEQ ID NO: 5253 - RNA, 86 nt, synthetic construct
  source 1..86: mol_type = other RNA
ctttgccaagtgttccagccaccggcccagggcaatgaacacaaagagcatggggggcgtgtcgaagaatgtcacaggtgatctct

SEQ ID NO: 5254 - RNA, 86 nt, synthetic construct
  source 1..86: mol_type = other RNA
ctttgccaagtgttccagccaccggcccagggcaatgaacacaaagagcatggggggcgtgtcgaagaatgtcacaggtgacctct

SEQ ID NO: 5255 - RNA, 86 nt, synthetic construct
  source 1..86: mol_type = other RNA
ctttgccaagtgttccagccaccggcccagggcaatgaacacaaagagcatggggggcgtgtcgaagaatgtcacaggagacctct

SEQ ID NO: 5256 - RNA, 86 nt, synthetic construct
  source 1..86: mol_type = other RNA
ctttgccaagtgttccagccaccggcccagggcaatgaacacaaagagcatggggggcgtgtcgaagaatgtcacaggggaacgct

SEQ ID NO: 5257 - RNA, 86 nt, synthetic construct
  source 1..86: mol_type = other RNA
ctttgccaagtgttccagccaccggcccagggcaatgaacacaaagagcatggggggcgtgtcgaagaatgtcacagggcttctct

SEQ ID NO: 5258 - RNA, 86 nt, synthetic construct
  source 1..86: mol_type = other RNA
ctttgccaagtgttccagccaccggcccagggcaatgaacacaaagagcatggggggcgtgtcgaagaatgtcacaggcgaacgct

SEQ ID NO: 5259 - RNA, 86 nt, synthetic construct
  source 1..86: mol_type = other RNA
ctttgccaagtgttccagccaccggcccagggcaatgaacacaaagagcatggggggcgtgtcgaagaatgtcacaggggatcgct

SEQ ID NO: 5260 - RNA, 86 nt, synthetic construct
  source 1..86: mol_type = other RNA
ctttgccaagtgttccagccaccggcccagggcaatgaacacaaagagcatggggggcgtgtcgaagaatgtcacaggggagcgct

SEQ ID NO: 5261 - RNA, 86 nt, synthetic construct
  source 1..86: mol_type = other RNA
ctttgccaagtgttccagccaccggcccagggcaatgaacacaaagagcatggggggcgtgtcgaagaatgtcacaggagatctct

SEQ ID NO: 5262 - RNA, 86 nt, synthetic construct
  source 1..86: mol_type = other RNA
ctttgccaagtgttccagccaccggcccagggcaatgaacacaaagagcatggggggcgtgtcgaagaatgtcacagggctcctct

SEQ ID NO: 5263 - RNA, 86 nt, synthetic construct
  source 1..86: mol_type = other RNA
ctttgccaagtgttccagccaccggcccagggcaatgaacacaaagagcatggggggcgtgtcgaagaatgtcacagggcttcgct

SEQ ID NO: 5264 - RNA, 86 nt, synthetic construct
  source 1..86: mol_type = other RNA
ctttgccaagtgttccagccaccggcccagggcaatgaacacaaagagcatggggggcgtgtcgaagaatgtcacaggtgagcgct

SEQ ID NO: 5265 - RNA, 86 nt, synthetic construct
  source 1..86: mol_type = other RNA
ctttgccaagtgttccagccaccggcccagggcaatgaacacaaagagcatggggggcgtgtcgaagaatgtcacaggagatcgct

SEQ ID NO: 5266 - RNA, 86 nt, synthetic construct
  source 1..86: mol_type = other RNA
ctttgccaagtgttccagccaccggcccagggcaatgaacacaaagagcatggggggcgtgtcgaagaatgtcacaggcgatcgct

SEQ ID NO: 5267 - RNA, 86 nt, synthetic construct
  source 1..86: mol_type = other RNA
ctttgccaagtgttccagccaccggcccagggcaatgaacacaaagagcatggggggcgtgtcgaagaatgtcacaggcgacctct

SEQ ID NO: 5268 - RNA, 86 nt, synthetic construct
  source 1..86: mol_type = other RNA
ctttgccaagtgttccagccaccggcccagggcaatgaacacaaagagcatggggggcgtgtcgaagaatgtcacaggggatctct

SEQ ID NO: 5269 - RNA, 86 nt, synthetic construct
  source 1..86: mol_type = other RNA
ctttgccaagtgttccagccaccggcccagggcaatgaacacaaagagcatggggggcgtgtcgaagaatgtcacaggcgatctct

SEQ ID NO: 5270 - RNA, 86 nt, synthetic construct
  source 1..86: mol_type = other RNA
ctttgccaagtgttccagccaccggcccagggcaatgaacacaaagagcatggggggcgtgtcgaagaatgtcacagggctgcgct

SEQ ID NO: 5271 - RNA, 87 nt, synthetic construct
  source 1..87: mol_type = other RNA
cctttgccaagtgttccagccaccggcccagggcaatgaacacaaagagcatggggggcgtgtcgaagaatgtcacagggctgcgct

SEQ ID NO: 5272 - RNA, 87 nt, synthetic construct
  source 1..87: mol_type = other RNA
cctttgccaagtgttccagccaccggcccagggcaatgaacacaaagagcatggggggcgtgtcgaagaatgtcacaggcgagcgct

SEQ ID NO: 5273 - RNA, 87 nt, synthetic construct
  source 1..87: mol_type = other RNA
cctttgccaagtgttccagccaccggcccagggcaatgaacacaaagagcatggggggcgtgtcgaagaatgtcacaggggagcgct

SEQ ID NO: 5274 - RNA, 87 nt, synthetic construct
  source 1..87: mol_type = other RNA
cctttgccaagtgttccagccaccggcccagggcaatgaacacaaagagcatggggggcgtgtcgaagaatgtcacaggtgaacgct

SEQ ID NO: 5275 - RNA, 87 nt, synthetic construct
  source 1..87: mol_type = other RNA
cctttgccaagtgttccagccaccggcccagggcaatgaacacaaagagcatggggggcgtgtcgaagaatgtcacagggctcctct

SEQ ID NO: 5276 - RNA, 87 nt, synthetic construct
  source 1..87: mol_type = other RNA
cctttgccaagtgttccagccaccggcccagggcaatgaacacaaagagcatggggggcgtgtcgaagaatgtcacaggtgacctct

SEQ ID NO: 5277 - RNA, 87 nt, synthetic construct
  source 1..87: mol_type = other RNA
cctttgccaagtgttccagccaccggcccagggcaatgaacacaaagagcatggggggcgtgtcgaagaatgtcacaggggatctct

SEQ ID NO: 5278 - RNA, 87 nt, synthetic construct
  source 1..87: mol_type = other RNA
cctttgccaagtgttccagccaccggcccagggcaatgaacacaaagagcatggggggcgtgtcgaagaatgtcacaggagatcgct

SEQ ID NO: 5279 - RNA, 87 nt, synthetic construct
  source 1..87: mol_type = other RNA
cctttgccaagtgttccagccaccggcccagggcaatgaacacaaagagcatggggggcgtgtcgaagaatgtcacaggtgagcgct

SEQ ID NO: 5280 - RNA, 87 nt, synthetic construct
  source 1..87: mol_type = other RNA
cctttgccaagtgttccagccaccggcccagggcaatgaacacaaagagcatggggggcgtgtcgaagaatgtcacaggtgatcgct

SEQ ID NO: 5281 - RNA, 87 nt, synthetic construct
  source 1..87: mol_type = other RNA
cctttgccaagtgttccagccaccggcccagggcaatgaacacaaagagcatggggggcgtgtcgaagaatgtcacaggcgatctct

SEQ ID NO: 5282 - RNA, 87 nt, synthetic construct
  source 1..87: mol_type = other RNA
cctttgccaagtgttccagccaccggcccagggcaatgaacacaaagagcatggggggcgtgtcgaagaatgtcacaggggatcgct

SEQ ID NO: 5283 - RNA, 87 nt, synthetic construct
  source 1..87: mol_type = other RNA
cctttgccaagtgttccagccaccggcccagggcaatgaacacaaagagcatggggggcgtgtcgaagaatgtcacaggggaacgct

SEQ ID NO: 5284 - RNA, 87 nt, synthetic construct
  source 1..87: mol_type = other RNA
cctttgccaagtgttccagccaccggcccagggcaatgaacacaaagagcatggggggcgtgtcgaagaatgtcacagggcttctct

SEQ ID NO: 5285 - RNA, 87 nt, synthetic construct
  source 1..87: mol_type = other RNA
cctttgccaagtgttccagccaccggcccagggcaatgaacacaaagagcatggggggcgtgtcgaagaatgtcacagggctacgct

SEQ ID NO: 5286 - RNA, 87 nt, synthetic construct
  source 1..87: mol_type = other RNA
cctttgccaagtgttccagccaccggcccagggcaatgaacacaaagagcatggggggcgtgtcgaagaatgtcacaggcgaacgct

SEQ ID NO: 5287 - RNA, 87 nt, synthetic construct
  source 1..87: mol_type = other RNA
cctttgccaagtgttccagccaccggcccagggcaatgaacacaaagagcatggggggcgtgtcgaagaatgtcacaggcgatcgct

SEQ ID NO: 5288 - RNA, 87 nt, synthetic construct
  source 1..87: mol_type = other RNA
cctttgccaagtgttccagccaccggcccagggcaatgaacacaaagagcatggggggcgtgtcgaagaatgtcacaggagacctct

SEQ ID NO: 5289 - RNA, 87 nt, synthetic construct
  source 1..87: mol_type = other RNA
cctttgccaagtgttccagccaccggcccagggcaatgaacacaaagagcatggggggcgtgtcgaagaatgtcacaggcgacctct

SEQ ID NO: 5290 - RNA, 87 nt, synthetic construct
  source 1..87: mol_type = other RNA
cctttgccaagtgttccagccaccggcccagggcaatgaacacaaagagcatggggggcgtgtcgaagaatgtcacaggagaacgct

SEQ ID NO: 5291 - RNA, 87 nt, synthetic construct
  source 1..87: mol_type = other RNA
cctttgccaagtgttccagccaccggcccagggcaatgaacacaaagagcatggggggcgtgtcgaagaatgtcacagggcttcgct

SEQ ID NO: 5292 - RNA, 87 nt, synthetic construct
  source 1..87: mol_type = other RNA
cctttgccaagtgttccagccaccggcccagggcaatgaacacaaagagcatggggggcgtgtcgaagaatgtcacaggagatctct

SEQ ID NO: 5293 - RNA, 87 nt, synthetic construct
  source 1..87: mol_type = other RNA
cctttgccaagtgttccagccaccggcccagggcaatgaacacaaagagcatggggggcgtgtcgaagaatgtcacaggggacctct

SEQ ID NO: 5294 - RNA, 87 nt, synthetic construct
  source 1..87: mol_type = other RNA
cctttgccaagtgttccagccaccggcccagggcaatgaacacaaagagcatggggggcgtgtcgaagaatgtcacaggagagcgct

SEQ ID NO: 5295 - RNA, 87 nt, synthetic construct
  source 1..87: mol_type = other RNA
cctttgccaagtgttccagccaccggcccagggcaatgaacacaaagagcatggggggcgtgtcgaagaatgtcacaggtgatctct

SEQ ID NO: 5296 - RNA, 88 nt, synthetic construct
  source 1..88: mol_type = other RNA
acctttgccaagtgttccagccaccggcccagggcaatgaacacaaagagcatggggggcgtgtcgaagaatgtcacaggtgacctct

SEQ ID NO: 5297 - RNA, 88 nt, synthetic construct
  source 1..88: mol_type = other RNA
acctttgccaagtgttccagccaccggcccagggcaatgaacacaaagagcatggggggcgtgtcgaagaatgtcacaggagagcgct

SEQ ID NO: 5298 - RNA, 88 nt, synthetic construct
  source 1..88: mol_type = other RNA
acctttgccaagtgttccagccaccggcccagggcaatgaacacaaagagcatggggggcgtgtcgaagaatgtcacaggggacctct

SEQ ID NO: 5299 - RNA, 88 nt, synthetic construct
  source 1..88: mol_type = other RNA
acctttgccaagtgttccagccaccggcccagggcaatgaacacaaagagcatggggggcgtgtcgaagaatgtcacaggtgaacgct

SEQ ID NO: 5300 - RNA, 88 nt, synthetic construct
  source 1..88: mol_type = other RNA
acctttgccaagtgttccagccaccggcccagggcaatgaacacaaagagcatggggggcgtgtcgaagaatgtcacaggagaacgct

SEQ ID NO: 5301 - RNA, 88 nt, synthetic construct
  source 1..88: mol_type = other RNA
acctttgccaagtgttccagccaccggcccagggcaatgaacacaaagagcatggggggcgtgtcgaagaatgtcacaggggagcgct

SEQ ID NO: 5302 - RNA, 88 nt, synthetic construct
  source 1..88: mol_type = other RNA
acctttgccaagtgttccagccaccggcccagggcaatgaacacaaagagcatggggggcgtgtcgaagaatgtcacagggctcctct

SEQ ID NO: 5303 - RNA, 88 nt, synthetic construct
  source 1..88: mol_type = other RNA
acctttgccaagtgttccagccaccggcccagggcaatgaacacaaagagcatggggggcgtgtcgaagaatgtcacaggagacctct

SEQ ID NO: 5304 - RNA, 88 nt, synthetic construct
  source 1..88: mol_type = other RNA
acctttgccaagtgttccagccaccggcccagggcaatgaacacaaagagcatggggggcgtgtcgaagaatgtcacagggctacgct

SEQ ID NO: 5305 - RNA, 88 nt, synthetic construct
  source 1..88: mol_type = other RNA
acctttgccaagtgttccagccaccggcccagggcaatgaacacaaagagcatggggggcgtgtcgaagaatgtcacagggcttctct

SEQ ID NO: 5306 - RNA, 88 nt, synthetic construct
  source 1..88: mol_type = other RNA
acctttgccaagtgttccagccaccggcccagggcaatgaacacaaagagcatggggggcgtgtcgaagaatgtcacaggagatctct

SEQ ID NO: 5307 - RNA, 88 nt, synthetic construct
  source 1..88: mol_type = other RNA
acctttgccaagtgttccagccaccggcccagggcaatgaacacaaagagcatggggggcgtgtcgaagaatgtcacagggcttcgct

SEQ ID NO: 5308 - RNA, 88 nt, synthetic construct
  source 1..88: mol_type = other RNA
acctttgccaagtgttccagccaccggcccagggcaatgaacacaaagagcatggggggcgtgtcgaagaatgtcacaggcgatcgct

SEQ ID NO: 5309 - RNA, 88 nt, synthetic construct
  source 1..88: mol_type = other RNA
acctttgccaagtgttccagccaccggcccagggcaatgaacacaaagagcatggggggcgtgtcgaagaatgtcacagggctgcgct

SEQ ID NO: 5310 - RNA, 88 nt, synthetic construct
  source 1..88: mol_type = other RNA
acctttgccaagtgttccagccaccggcccagggcaatgaacacaaagagcatggggggcgtgtcgaagaatgtcacaggggatcgct

SEQ ID NO: 5311 - RNA, 88 nt, synthetic construct
  source 1..88: mol_type = other RNA
acctttgccaagtgttccagccaccggcccagggcaatgaacacaaagagcatggggggcgtgtcgaagaatgtcacaggggatctct

SEQ ID NO: 5312 - RNA, 88 nt, synthetic construct
  source 1..88: mol_type = other RNA
acctttgccaagtgttccagccaccggcccagggcaatgaacacaaagagcatggggggcgtgtcgaagaatgtcacaggtgatctct

SEQ ID NO: 5313 - RNA, 88 nt, synthetic construct
  source 1..88: mol_type = other RNA
acctttgccaagtgttccagccaccggcccagggcaatgaacacaaagagcatggggggcgtgtcgaagaatgtcacaggagatcgct

SEQ ID NO: 5314 - RNA, 88 nt, synthetic construct
  source 1..88: mol_type = other RNA
acctttgccaagtgttccagccaccggcccagggcaatgaacacaaagagcatggggggcgtgtcgaagaatgtcacaggggaacgct

SEQ ID NO: 5315 - RNA, 88 nt, synthetic construct
  source 1..88: mol_type = other RNA
acctttgccaagtgttccagccaccggcccagggcaatgaacacaaagagcatggggggcgtgtcgaagaatgtcacaggtgagcgct

SEQ ID NO: 5316 - RNA, 88 nt, synthetic construct
  source 1..88: mol_type = other RNA
acctttgccaagtgttccagccaccggcccagggcaatgaacacaaagagcatggggggcgtgtcgaagaatgtcacaggcgagcgct

SEQ ID NO: 5317 - RNA, 88 nt, synthetic construct
  source 1..88: mol_type = other RNA
acctttgccaagtgttccagccaccggcccagggcaatgaacacaaagagcatggggggcgtgtcgaagaatgtcacaggcgaacgct

SEQ ID NO: 5318 - RNA, 88 nt, synthetic construct
  source 1..88: mol_type = other RNA
acctttgccaagtgttccagccaccggcccagggcaatgaacacaaagagcatggggggcgtgtcgaagaatgtcacaggtgatcgct

SEQ ID NO: 5319 - RNA, 88 nt, synthetic construct
  source 1..88: mol_type = other RNA
acctttgccaagtgttccagccaccggcccagggcaatgaacacaaagagcatggggggcgtgtcgaagaatgtcacaggcgatctct

SEQ ID NO: 5320 - RNA, 88 nt, synthetic construct
  source 1..88: mol_type = other RNA
acctttgccaagtgttccagccaccggcccagggcaatgaacacaaagagcatggggggcgtgtcgaagaatgtcacaggcgacctct

SEQ ID NO: 5321 - RNA, 89 nt, synthetic construct
  source 1..89: mol_type = other RNA
tacctttgccaagtgttccagccaccggcccagggcaatgaacacaaagagcatggggggcgtgtcgaagaatgtcacagggctcctct

SEQ ID NO: 5322 - RNA, 89 nt, synthetic construct
  source 1..89: mol_type = other RNA
tacctttgccaagtgttccagccaccggcccagggcaatgaacacaaagagcatggggggcgtgtcgaagaatgtcacagggctacgct

SEQ ID NO: 5323 - RNA, 89 nt, synthetic construct
  source 1..89: mol_type = other RNA
tacctttgccaagtgttccagccaccggcccagggcaatgaacacaaagagcatggggggcgtgtcgaagaatgtcacaggcgatctct

SEQ ID NO: 5324 - RNA, 89 nt, synthetic construct
  source 1..89: mol_type = other RNA
tacctttgccaagtgttccagccaccggcccagggcaatgaacacaaagagcatggggggcgtgtcgaagaatgtcacaggtgatctct

SEQ ID NO: 5325 - RNA, 89 nt, synthetic construct
  source 1..89: mol_type = other RNA
tacctttgccaagtgttccagccaccggcccagggcaatgaacacaaagagcatggggggcgtgtcgaagaatgtcacaggggatcgct

SEQ ID NO: 5326 - RNA, 89 nt, synthetic construct
  source 1..89: mol_type = other RNA
tacctttgccaagtgttccagccaccggcccagggcaatgaacacaaagagcatggggggcgtgtcgaagaatgtcacaggggacctct

SEQ ID NO: 5327 - RNA, 89 nt, synthetic construct
  source 1..89: mol_type = other RNA
tacctttgccaagtgttccagccaccggcccagggcaatgaacacaaagagcatggggggcgtgtcgaagaatgtcacaggggatctct

SEQ ID NO: 5328 - RNA, 89 nt, synthetic construct
  source 1..89: mol_type = other RNA
tacctttgccaagtgttccagccaccggcccagggcaatgaacacaaagagcatggggggcgtgtcgaagaatgtcacaggggagcgct

SEQ ID NO: 5329 - RNA, 89 nt, synthetic construct
  source 1..89: mol_type = other RNA
tacctttgccaagtgttccagccaccggcccagggcaatgaacacaaagagcatggggggcgtgtcgaagaatgtcacaggagagcgct

SEQ ID NO: 5330 - RNA, 89 nt, synthetic construct
  source 1..89: mol_type = other RNA
tacctttgccaagtgttccagccaccggcccagggcaatgaacacaaagagcatggggggcgtgtcgaagaatgtcacagggctgcgct

SEQ ID NO: 5331 - RNA, 89 nt, synthetic construct
  source 1..89: mol_type = other RNA
tacctttgccaagtgttccagccaccggcccagggcaatgaacacaaagagcatggggggcgtgtcgaagaatgtcacaggtgatcgct

SEQ ID NO: 5332 - RNA, 89 nt, synthetic construct
  source 1..89: mol_type = other RNA
tacctttgccaagtgttccagccaccggcccagggcaatgaacacaaagagcatggggggcgtgtcgaagaatgtcacaggcgatcgct

SEQ ID NO: 5333 - RNA, 89 nt, synthetic construct
  source 1..89: mol_type = other RNA
tacctttgccaagtgttccagccaccggcccagggcaatgaacacaaagagcatggggggcgtgtcgaagaatgtcacaggagacctct

SEQ ID NO: 5334 - RNA, 89 nt, synthetic construct
  source 1..89: mol_type = other RNA
tacctttgccaagtgttccagccaccggcccagggcaatgaacacaaagagcatggggggcgtgtcgaagaatgtcacaggtgaacgct

SEQ ID NO: 5335 - RNA, 89 nt, synthetic construct
  source 1..89: mol_type = other RNA
tacctttgccaagtgttccagccaccggcccagggcaatgaacacaaagagcatggggggcgtgtcgaagaatgtcacaggcgacctct

SEQ ID NO: 5336 - RNA, 89 nt, synthetic construct
  source 1..89: mol_type = other RNA
tacctttgccaagtgttccagccaccggcccagggcaatgaacacaaagagcatggggggcgtgtcgaagaatgtcacaggggaacgct

SEQ ID NO: 5337 - RNA, 89 nt, synthetic construct
  source 1..89: mol_type = other RNA
tacctttgccaagtgttccagccaccggcccagggcaatgaacacaaagagcatggggggcgtgtcgaagaatgtcacagggcttcgct

SEQ ID NO: 5338 - RNA, 89 nt, synthetic construct
  source 1..89: mol_type = other RNA
tacctttgccaagtgttccagccaccggcccagggcaatgaacacaaagagcatggggggcgtgtcgaagaatgtcacaggagaacgct

SEQ ID NO: 5339 - RNA, 89 nt, synthetic construct
  source 1..89: mol_type = other RNA
tacctttgccaagtgttccagccaccggcccagggcaatgaacacaaagagcatggggggcgtgtcgaagaatgtcacaggtgagcgct

SEQ ID NO: 5340 - RNA, 89 nt, synthetic construct
  source 1..89: mol_type = other RNA
tacctttgccaagtgttccagccaccggcccagggcaatgaacacaaagagcatggggggcgtgtcgaagaatgtcacaggtgacctct

SEQ ID NO: 5341 - RNA, 89 nt, synthetic construct
  source 1..89: mol_type = other RNA
tacctttgccaagtgttccagccaccggcccagggcaatgaacacaaagagcatggggggcgtgtcgaagaatgtcacaggcgaacgct

SEQ ID NO: 5342 - RNA, 89 nt, synthetic construct
  source 1..89: mol_type = other RNA
tacctttgccaagtgttccagccaccggcccagggcaatgaacacaaagagcatggggggcgtgtcgaagaatgtcacaggcgagcgct

SEQ ID NO: 5343 - RNA, 89 nt, synthetic construct
  source 1..89: mol_type = other RNA
tacctttgccaagtgttccagccaccggcccagggcaatgaacacaaagagcatggggggcgtgtcgaagaatgtcacagggcttctct

SEQ ID NO: 5344 - RNA, 89 nt, synthetic construct
  source 1..89: mol_type = other RNA
tacctttgccaagtgttccagccaccggcccagggcaatgaacacaaagagcatggggggcgtgtcgaagaatgtcacaggagatctct

SEQ ID NO: 5345 - RNA, 89 nt, synthetic construct
  source 1..89: mol_type = other RNA
tacctttgccaagtgttccagccaccggcccagggcaatgaacacaaagagcatggggggcgtgtcgaagaatgtcacaggagatcgct

SEQ ID NO: 5346 - RNA, 90 nt, synthetic construct
  source 1..90: mol_type = other RNA
ttacctttgccaagtgttccagccaccggcccagggcaatgaacacaaagagcatggggggcgtgtcgaagaatgtcacaggggaacgct

SEQ ID NO: 5347 - RNA, 90 nt, synthetic construct
  source 1..90: mol_type = other RNA
ttacctttgccaagtgttccagccaccggcccagggcaatgaacacaaagagcatggggggcgtgtcgaagaatgtcacaggggacctct

SEQ ID NO: 5348 - RNA, 90 nt, synthetic construct
  source 1..90: mol_type = other RNA
ttacctttgccaagtgttccagccaccggcccagggcaatgaacacaaagagcatggggggcgtgtcgaagaatgtcacaggtgaacgct

SEQ ID NO: 5349 - RNA, 90 nt, synthetic construct
  source 1..90: mol_type = other RNA
ttacctttgccaagtgttccagccaccggcccagggcaatgaacacaaagagcatggggggcgtgtcgaagaatgtcacaggcgatctct

SEQ ID NO: 5350 - RNA, 90 nt, synthetic construct
  source 1..90: mol_type = other RNA
ttacctttgccaagtgttccagccaccggcccagggcaatgaacacaaagagcatggggggcgtgtcgaagaatgtcacaggtgagcgct

SEQ ID NO: 5351 - RNA, 90 nt, synthetic construct
  source 1..90: mol_type = other RNA
ttacctttgccaagtgttccagccaccggcccagggcaatgaacacaaagagcatggggggcgtgtcgaagaatgtcacaggcgatcgct

SEQ ID NO: 5352 - RNA, 90 nt, synthetic construct
  source 1..90: mol_type = other RNA
ttacctttgccaagtgttccagccaccggcccagggcaatgaacacaaagagcatggggggcgtgtcgaagaatgtcacagggcttctct

SEQ ID NO: 5353 - RNA, 90 nt, synthetic construct
  source 1..90: mol_type = other RNA
ttacctttgccaagtgttccagccaccggcccagggcaatgaacacaaagagcatggggggcgtgtcgaagaatgtcacaggtgatcgct

SEQ ID NO: 5354 - RNA, 90 nt, synthetic construct
  source 1..90: mol_type = other RNA
ttacctttgccaagtgttccagccaccggcccagggcaatgaacacaaagagcatggggggcgtgtcgaagaatgtcacaggagatcgct

SEQ ID NO: 5355 - RNA, 90 nt, synthetic construct
  source 1..90: mol_type = other RNA
ttacctttgccaagtgttccagccaccggcccagggcaatgaacacaaagagcatggggggcgtgtcgaagaatgtcacagggcttcgct

SEQ ID NO: 5356 - RNA, 90 nt, synthetic construct
  source 1..90: mol_type = other RNA
ttacctttgccaagtgttccagccaccggcccagggcaatgaacacaaagagcatggggggcgtgtcgaagaatgtcacaggtgacctct

SEQ ID NO: 5357 - RNA, 90 nt, synthetic construct
  source 1..90: mol_type = other RNA
ttacctttgccaagtgttccagccaccggcccagggcaatgaacacaaagagcatggggggcgtgtcgaagaatgtcacagggctgcgct

SEQ ID NO: 5358 - RNA, 90 nt, synthetic construct
  source 1..90: mol_type = other RNA
ttacctttgccaagtgttccagccaccggcccagggcaatgaacacaaagagcatggggggcgtgtcgaagaatgtcacaggagaacgct

SEQ ID NO: 5359 - RNA, 90 nt, synthetic construct
  source 1..90: mol_type = other RNA
ttacctttgccaagtgttccagccaccggcccagggcaatgaacacaaagagcatggggggcgtgtcgaagaatgtcacaggagacctct

SEQ ID NO: 5360 - RNA, 90 nt, synthetic construct
  source 1..90: mol_type = other RNA
ttacctttgccaagtgttccagccaccggcccagggcaatgaacacaaagagcatggggggcgtgtcgaagaatgtcacaggggatctct

SEQ ID NO: 5361 - RNA, 90 nt, synthetic construct
  source 1..90: mol_type = other RNA
ttacctttgccaagtgttccagccaccggcccagggcaatgaacacaaagagcatggggggcgtgtcgaagaatgtcacaggagagcgct

SEQ ID NO: 5362 - RNA, 90 nt, synthetic construct
  source 1..90: mol_type = other RNA
ttacctttgccaagtgttccagccaccggcccagggcaatgaacacaaagagcatggggggcgtgtcgaagaatgtcacaggggagcgct

SEQ ID NO: 5363 - RNA, 90 nt, synthetic construct
  source 1..90: mol_type = other RNA
ttacctttgccaagtgttccagccaccggcccagggcaatgaacacaaagagcatggggggcgtgtcgaagaatgtcacaggagatctct

SEQ ID NO: 5364 - RNA, 90 nt, synthetic construct
  source 1..90: mol_type = other RNA
ttacctttgccaagtgttccagccaccggcccagggcaatgaacacaaagagcatggggggcgtgtcgaagaatgtcacaggggatcgct

SEQ ID NO: 5365 - RNA, 90 nt, synthetic construct
  source 1..90: mol_type = other RNA
ttacctttgccaagtgttccagccaccggcccagggcaatgaacacaaagagcatggggggcgtgtcgaagaatgtcacagggctcctct

SEQ ID NO: 5366 - RNA, 90 nt, synthetic construct
  source 1..90: mol_type = other RNA
ttacctttgccaagtgttccagccaccggcccagggcaatgaacacaaagagcatggggggcgtgtcgaagaatgtcacaggcgacctct

SEQ ID NO: 5367 - RNA, 90 nt, synthetic construct
  source 1..90: mol_type = other RNA
ttacctttgccaagtgttccagccaccggcccagggcaatgaacacaaagagcatggggggcgtgtcgaagaatgtcacagggctacgct

SEQ ID NO: 5368 - RNA, 90 nt, synthetic construct
  source 1..90: mol_type = other RNA
ttacctttgccaagtgttccagccaccggcccagggcaatgaacacaaagagcatggggggcgtgtcgaagaatgtcacaggcgaacgct

SEQ ID NO: 5369 - RNA, 90 nt, synthetic construct
  source 1..90: mol_type = other RNA
ttacctttgccaagtgttccagccaccggcccagggcaatgaacacaaagagcatggggggcgtgtcgaagaatgtcacaggcgagcgct

SEQ ID NO: 5370 - RNA, 90 nt, synthetic construct
  source 1..90: mol_type = other RNA
ttacctttgccaagtgttccagccaccggcccagggcaatgaacacaaagagcatggggggcgtgtcgaagaatgtcacaggtgatctct

SEQ ID NO: 5371 - RNA, 91 nt, synthetic construct
  source 1..91: mol_type = other RNA
gttacctttgccaagtgttccagccaccggcccagggcaatgaacacaaagagcatggggggcgtgtcgaagaatgtcacaggcgatctct

SEQ ID NO: 5372 - RNA, 91 nt, synthetic construct
  source 1..91: mol_type = other RNA
gttacctttgccaagtgttccagccaccggcccagggcaatgaacacaaagagcatggggggcgtgtcgaagaatgtcacaggtgaacgct

SEQ ID NO: 5373 - RNA, 91 nt, synthetic construct
  source 1..91: mol_type = other RNA
gttacctttgccaagtgttccagccaccggcccagggcaatgaacacaaagagcatggggggcgtgtcgaagaatgtcacaggcgatcgct

SEQ ID NO: 5374 - RNA, 91 nt, synthetic construct
  source 1..91: mol_type = other RNA
gttacctttgccaagtgttccagccaccggcccagggcaatgaacacaaagagcatggggggcgtgtcgaagaatgtcacaggagaacgct

SEQ ID NO: 5375 - RNA, 91 nt, synthetic construct
  source 1..91: mol_type = other RNA
gttacctttgccaagtgttccagccaccggcccagggcaatgaacacaaagagcatggggggcgtgtcgaagaatgtcacaggggaacgct

SEQ ID NO: 5376 - RNA, 91 nt, synthetic construct
  source 1..91: mol_type = other RNA
gttacctttgccaagtgttccagccaccggcccagggcaatgaacacaaagagcatggggggcgtgtcgaagaatgtcacaggtgatcgct

SEQ ID NO: 5377 - RNA, 91 nt, synthetic construct
  source 1..91: mol_type = other RNA
gttacctttgccaagtgttccagccaccggcccagggcaatgaacacaaagagcatggggggcgtgtcgaagaatgtcacaggtgagcgct

SEQ ID NO: 5378 - RNA, 91 nt, synthetic construct
  source 1..91: mol_type = other RNA
gttacctttgccaagtgttccagccaccggcccagggcaatgaacacaaagagcatggggggcgtgtcgaagaatgtcacaggggagcgct

SEQ ID NO: 5379 - RNA, 91 nt, synthetic construct
  source 1..91: mol_type = other RNA
gttacctttgccaagtgttccagccaccggcccagggcaatgaacacaaagagcatggggggcgtgtcgaagaatgtcacaggtgatctct

SEQ ID NO: 5380 - RNA, 91 nt, synthetic construct
  source 1..91: mol_type = other RNA
gttacctttgccaagtgttccagccaccggcccagggcaatgaacacaaagagcatggggggcgtgtcgaagaatgtcacaggggacctct

SEQ ID NO: 5381 - RNA, 91 nt, synthetic construct
  source 1..91: mol_type = other RNA
gttacctttgccaagtgttccagccaccggcccagggcaatgaacacaaagagcatggggggcgtgtcgaagaatgtcacaggcgaacgct

SEQ ID NO: 5382 - RNA, 91 nt, synthetic construct
  source 1..91: mol_type = other RNA
gttacctttgccaagtgttccagccaccggcccagggcaatgaacacaaagagcatggggggcgtgtcgaagaatgtcacagggctcctct

SEQ ID NO: 5383 - RNA, 91 nt, synthetic construct
  source 1..91: mol_type = other RNA
gttacctttgccaagtgttccagccaccggcccagggcaatgaacacaaagagcatggggggcgtgtcgaagaatgtcacaggagacctct

SEQ ID NO: 5384 - RNA, 91 nt, synthetic construct
  source 1..91: mol_type = other RNA
gttacctttgccaagtgttccagccaccggcccagggcaatgaacacaaagagcatggggggcgtgtcgaagaatgtcacagggctacgct

SEQ ID NO: 5385 - RNA, 91 nt, synthetic construct
  source 1..91: mol_type = other RNA
gttacctttgccaagtgttccagccaccggcccagggcaatgaacacaaagagcatggggggcgtgtcgaagaatgtcacaggtgacctct

SEQ ID NO: 5386 - RNA, 91 nt, synthetic construct
  source 1..91: mol_type = other RNA
gttacctttgccaagtgttccagccaccggcccagggcaatgaacacaaagagcatggggggcgtgtcgaagaatgtcacaggagagcgct

SEQ ID NO: 5387 - RNA, 91 nt, synthetic construct
  source 1..91: mol_type = other RNA
gttacctttgccaagtgttccagccaccggcccagggcaatgaacacaaagagcatggggggcgtgtcgaagaatgtcacagggcttcgct

SEQ ID NO: 5388 - RNA, 91 nt, synthetic construct
  source 1..91: mol_type = other RNA
gttacctttgccaagtgttccagccaccggcccagggcaatgaacacaaagagcatggggggcgtgtcgaagaatgtcacaggcgacctct

SEQ ID NO: 5389 - RNA, 91 nt, synthetic construct
  source 1..91: mol_type = other RNA
gttacctttgccaagtgttccagccaccggcccagggcaatgaacacaaagagcatggggggcgtgtcgaagaatgtcacagggctgcgct

SEQ ID NO: 5390 - RNA, 91 nt, synthetic construct
  source 1..91: mol_type = other RNA
gttacctttgccaagtgttccagccaccggcccagggcaatgaacacaaagagcatggggggcgtgtcgaagaatgtcacaggagatctct

SEQ ID NO: 5391 - RNA, 91 nt, synthetic construct
  source 1..91: mol_type = other RNA
gttacctttgccaagtgttccagccaccggcccagggcaatgaacacaaagagcatggggggcgtgtcgaagaatgtcacaggagatcgct

SEQ ID NO: 5392 - RNA, 91 nt, synthetic construct
  source 1..91: mol_type = other RNA
gttacctttgccaagtgttccagccaccggcccagggcaatgaacacaaagagcatggggggcgtgtcgaagaatgtcacaggggatcgct

SEQ ID NO: 5393 - RNA, 91 nt, synthetic construct
  source 1..91: mol_type = other RNA
gttacctttgccaagtgttccagccaccggcccagggcaatgaacacaaagagcatggggggcgtgtcgaagaatgtcacaggcgagcgct

SEQ ID NO: 5394 - RNA, 91 nt, synthetic construct
  source 1..91: mol_type = other RNA
gttacctttgccaagtgttccagccaccggcccagggcaatgaacacaaagagcatggggggcgtgtcgaagaatgtcacagggcttctct

SEQ ID NO: 5395 - RNA, 91 nt, synthetic construct
  source 1..91: mol_type = other RNA
gttacctttgccaagtgttccagccaccggcccagggcaatgaacacaaagagcatggggggcgtgtcgaagaatgtcacaggggatctct

SEQ ID NO: 5396 - RNA, 92 nt, synthetic construct
  source 1..92: mol_type = other RNA
tgttacctttgccaagtgttccagccaccggcccagggcaatgaacacaaagagcatggggggcgtgtcgaagaatgtcacaggagatcgct

SEQ ID NO: 5397 - RNA, 92 nt, synthetic construct
  source 1..92: mol_type = other RNA
tgttacctttgccaagtgttccagccaccggcccagggcaatgaacacaaagagcatggggggcgtgtcgaagaatgtcacaggcgatcgct

SEQ ID NO: 5398 - RNA, 92 nt, synthetic construct
  source 1..92: mol_type = other RNA
tgttacctttgccaagtgttccagccaccggcccagggcaatgaacacaaagagcatggggggcgtgtcgaagaatgtcacaggggacctct

SEQ ID NO: 5399 - RNA, 92 nt, synthetic construct
  source 1..92: mol_type = other RNA
tgttacctttgccaagtgttccagccaccggcccagggcaatgaacacaaagagcatggggggcgtgtcgaagaatgtcacaggagaacgct

SEQ ID NO: 5400 - RNA, 92 nt, synthetic construct
  source 1..92: mol_type = other RNA
tgttacctttgccaagtgttccagccaccggcccagggcaatgaacacaaagagcatggggggcgtgtcgaagaatgtcacaggggaacgct

SEQ ID NO: 5401 - RNA, 92 nt, synthetic construct
  source 1..92: mol_type = other RNA
tgttacctttgccaagtgttccagccaccggcccagggcaatgaacacaaagagcatggggggcgtgtcgaagaatgtcacaggagatctct

SEQ ID NO: 5402 - RNA, 92 nt, synthetic construct
  source 1..92: mol_type = other RNA
tgttacctttgccaagtgttccagccaccggcccagggcaatgaacacaaagagcatggggggcgtgtcgaagaatgtcacaggggatctct

SEQ ID NO: 5403 - RNA, 92 nt, synthetic construct
  source 1..92: mol_type = other RNA
tgttacctttgccaagtgttccagccaccggcccagggcaatgaacacaaagagcatggggggcgtgtcgaagaatgtcacaggtgatctct

SEQ ID NO: 5404 - RNA, 92 nt, synthetic construct
  source 1..92: mol_type = other RNA
tgttacctttgccaagtgttccagccaccggcccagggcaatgaacacaaagagcatggggggcgtgtcgaagaatgtcacaggcgaacgct

SEQ ID NO: 5405 - RNA, 92 nt, synthetic construct
  source 1..92: mol_type = other RNA
tgttacctttgccaagtgttccagccaccggcccagggcaatgaacacaaagagcatggggggcgtgtcgaagaatgtcacaggagacctct

SEQ ID NO: 5406 - RNA, 92 nt, synthetic construct
  source 1..92: mol_type = other RNA
tgttacctttgccaagtgttccagccaccggcccagggcaatgaacacaaagagcatggggggcgtgtcgaagaatgtcacaggggatcgct

SEQ ID NO: 5407 - RNA, 92 nt, synthetic construct
  source 1..92: mol_type = other RNA
tgttacctttgccaagtgttccagccaccggcccagggcaatgaacacaaagagcatggggggcgtgtcgaagaatgtcacaggcgacctct

SEQ ID NO: 5408 - RNA, 92 nt, synthetic construct
  source 1..92: mol_type = other RNA
tgttacctttgccaagtgttccagccaccggcccagggcaatgaacacaaagagcatggggggcgtgtcgaagaatgtcacagggctgcgct

SEQ ID NO: 5409 - RNA, 92 nt, synthetic construct
  source 1..92: mol_type = other RNA
tgttacctttgccaagtgttccagccaccggcccagggcaatgaacacaaagagcatggggggcgtgtcgaagaatgtcacagggctacgct

SEQ ID NO: 5410 - RNA, 92 nt, synthetic construct
  source 1..92: mol_type = other RNA
tgttacctttgccaagtgttccagccaccggcccagggcaatgaacacaaagagcatggggggcgtgtcgaagaatgtcacaggtgagcgct

SEQ ID NO: 5411 - RNA, 92 nt, synthetic construct
  source 1..92: mol_type = other RNA
tgttacctttgccaagtgttccagccaccggcccagggcaatgaacacaaagagcatggggggcgtgtcgaagaatgtcacaggtgaacgct

SEQ ID NO: 5412 - RNA, 92 nt, synthetic construct
  source 1..92: mol_type = other RNA
tgttacctttgccaagtgttccagccaccggcccagggcaatgaacacaaagagcatggggggcgtgtcgaagaatgtcacagggcttctct

SEQ ID NO: 5413 - RNA, 92 nt, synthetic construct
  source 1..92: mol_type = other RNA
tgttacctttgccaagtgttccagccaccggcccagggcaatgaacacaaagagcatggggggcgtgtcgaagaatgtcacaggcgatctct

SEQ ID NO: 5414 - RNA, 92 nt, synthetic construct
  source 1..92: mol_type = other RNA
tgttacctttgccaagtgttccagccaccggcccagggcaatgaacacaaagagcatggggggcgtgtcgaagaatgtcacaggggagcgct

SEQ ID NO: 5415 - RNA, 92 nt, synthetic construct
  source 1..92: mol_type = other RNA
tgttacctttgccaagtgttccagccaccggcccagggcaatgaacacaaagagcatggggggcgtgtcgaagaatgtcacagggctcctct

SEQ ID NO: 5416 - RNA, 92 nt, synthetic construct
  source 1..92: mol_type = other RNA
tgttacctttgccaagtgttccagccaccggcccagggcaatgaacacaaagagcatggggggcgtgtcgaagaatgtcacaggtgacctct

SEQ ID NO: 5417 - RNA, 92 nt, synthetic construct
  source 1..92: mol_type = other RNA
tgttacctttgccaagtgttccagccaccggcccagggcaatgaacacaaagagcatggggggcgtgtcgaagaatgtcacaggagagcgct

SEQ ID NO: 5418 - RNA, 92 nt, synthetic construct
  source 1..92: mol_type = other RNA
tgttacctttgccaagtgttccagccaccggcccagggcaatgaacacaaagagcatggggggcgtgtcgaagaatgtcacaggcgagcgct

SEQ ID NO: 5419 - RNA, 92 nt, synthetic construct
  source 1..92: mol_type = other RNA
tgttacctttgccaagtgttccagccaccggcccagggcaatgaacacaaagagcatggggggcgtgtcgaagaatgtcacagggcttcgct

SEQ ID NO: 5420 - RNA, 92 nt, synthetic construct
  source 1..92: mol_type = other RNA
tgttacctttgccaagtgttccagccaccggcccagggcaatgaacacaaagagcatggggggcgtgtcgaagaatgtcacaggtgatcgct

SEQ ID NO: 5421 - RNA, 93 nt, synthetic construct
  source 1..93: mol_type = other RNA
ctgttacctttgccaagtgttccagccaccggcccagggcaatgaacacaaagagcatggggggcgtgtcgaagaatgtcacaggtgacctct

SEQ ID NO: 5422 - RNA, 93 nt, synthetic construct
  source 1..93: mol_type = other RNA
ctgttacctttgccaagtgttccagccaccggcccagggcaatgaacacaaagagcatggggggcgtgtcgaagaatgtcacaggagatcgct

SEQ ID NO: 5423 - RNA, 93 nt, synthetic construct
  source 1..93: mol_type = other RNA
ctgttacctttgccaagtgttccagccaccggcccagggcaatgaacacaaagagcatggggggcgtgtcgaagaatgtcacaggggatcgct

SEQ ID NO: 5424 - RNA, 93 nt, synthetic construct
  source 1..93: mol_type = other RNA
ctgttacctttgccaagtgttccagccaccggcccagggcaatgaacacaaagagcatggggggcgtgtcgaagaatgtcacaggcgatctct

SEQ ID NO: 5425 - RNA, 93 nt, synthetic construct
  source 1..93: mol_type = other RNA
ctgttacctttgccaagtgttccagccaccggcccagggcaatgaacacaaagagcatggggggcgtgtcgaagaatgtcacaggagatctct

SEQ ID NO: 5426 - RNA, 93 nt, synthetic construct
  source 1..93: mol_type = other RNA
ctgttacctttgccaagtgttccagccaccggcccagggcaatgaacacaaagagcatggggggcgtgtcgaagaatgtcacaggggatctct

SEQ ID NO: 5427 - RNA, 93 nt, synthetic construct
  source 1..93: mol_type = other RNA
ctgttacctttgccaagtgttccagccaccggcccagggcaatgaacacaaagagcatggggggcgtgtcgaagaatgtcacagggcttcgct

SEQ ID NO: 5428 - RNA, 93 nt, synthetic construct
  source 1..93: mol_type = other RNA
ctgttacctttgccaagtgttccagccaccggcccagggcaatgaacacaaagagcatggggggcgtgtcgaagaatgtcacaggcgagcgct

SEQ ID NO: 5429 - RNA, 93 nt, synthetic construct
  source 1..93: mol_type = other RNA
ctgttacctttgccaagtgttccagccaccggcccagggcaatgaacacaaagagcatggggggcgtgtcgaagaatgtcacaggggacctct

SEQ ID NO: 5430 - RNA, 93 nt, synthetic construct
  source 1..93: mol_type = other RNA
ctgttacctttgccaagtgttccagccaccggcccagggcaatgaacacaaagagcatggggggcgtgtcgaagaatgtcacagggctcctct

SEQ ID NO: 5431 - RNA, 93 nt, synthetic construct
  source 1..93: mol_type = other RNA
ctgttacctttgccaagtgttccagccaccggcccagggcaatgaacacaaagagcatggggggcgtgtcgaagaatgtcacagggcttctct

SEQ ID NO: 5432 - RNA, 93 nt, synthetic construct
  source 1..93: mol_type = other RNA
ctgttacctttgccaagtgttccagccaccggcccagggcaatgaacacaaagagcatggggggcgtgtcgaagaatgtcacaggtgatcgct

SEQ ID NO: 5433 - RNA, 93 nt, synthetic construct
  source 1..93: mol_type = other RNA
ctgttacctttgccaagtgttccagccaccggcccagggcaatgaacacaaagagcatggggggcgtgtcgaagaatgtcacagggctgcgct

SEQ ID NO: 5434 - RNA, 93 nt, synthetic construct
  source 1..93: mol_type = other RNA
ctgttacctttgccaagtgttccagccaccggcccagggcaatgaacacaaagagcatggggggcgtgtcgaagaatgtcacaggcgaacgct

SEQ ID NO: 5435 - RNA, 93 nt, synthetic construct
  source 1..93: mol_type = other RNA
ctgttacctttgccaagtgttccagccaccggcccagggcaatgaacacaaagagcatggggggcgtgtcgaagaatgtcacaggtgagcgct

SEQ ID NO: 5436 - RNA, 93 nt, synthetic construct
  source 1..93: mol_type = other RNA
ctgttacctttgccaagtgttccagccaccggcccagggcaatgaacacaaagagcatggggggcgtgtcgaagaatgtcacaggtgaacgct

SEQ ID NO: 5437 - RNA, 93 nt, synthetic construct
  source 1..93: mol_type = other RNA
ctgttacctttgccaagtgttccagccaccggcccagggcaatgaacacaaagagcatggggggcgtgtcgaagaatgtcacaggggagcgct

SEQ ID NO: 5438 - RNA, 93 nt, synthetic construct
  source 1..93: mol_type = other RNA
ctgttacctttgccaagtgttccagccaccggcccagggcaatgaacacaaagagcatggggggcgtgtcgaagaatgtcacaggagagcgct

SEQ ID NO: 5439 - RNA, 93 nt, synthetic construct
  source 1..93: mol_type = other RNA
ctgttacctttgccaagtgttccagccaccggcccagggcaatgaacacaaagagcatggggggcgtgtcgaagaatgtcacagggctacgct

SEQ ID NO: 5440 - RNA, 93 nt, synthetic construct
  source 1..93: mol_type = other RNA
ctgttacctttgccaagtgttccagccaccggcccagggcaatgaacacaaagagcatggggggcgtgtcgaagaatgtcacaggagaacgct

SEQ ID NO: 5441 - RNA, 93 nt, synthetic construct
  source 1..93: mol_type = other RNA
ctgttacctttgccaagtgttccagccaccggcccagggcaatgaacacaaagagcatggggggcgtgtcgaagaatgtcacaggcgacctct

SEQ ID NO: 5442 - RNA, 93 nt, synthetic construct
  source 1..93: mol_type = other RNA
ctgttacctttgccaagtgttccagccaccggcccagggcaatgaacacaaagagcatggggggcgtgtcgaagaatgtcacaggcgatcgct

SEQ ID NO: 5443 - RNA, 93 nt, synthetic construct
  source 1..93: mol_type = other RNA
ctgttacctttgccaagtgttccagccaccggcccagggcaatgaacacaaagagcatggggggcgtgtcgaagaatgtcacaggggaacgct

SEQ ID NO: 5444 - RNA, 93 nt, synthetic construct
  source 1..93: mol_type = other RNA
ctgttacctttgccaagtgttccagccaccggcccagggcaatgaacacaaagagcatggggggcgtgtcgaagaatgtcacaggagacctct

SEQ ID NO: 5445 - RNA, 93 nt, synthetic construct
  source 1..93: mol_type = other RNA
ctgttacctttgccaagtgttccagccaccggcccagggcaatgaacacaaagagcatggggggcgtgtcgaagaatgtcacaggtgatctct

SEQ ID NO: 5446 - RNA, 94 nt, synthetic construct
  source 1..94: mol_type = other RNA
gctgttacctttgccaagtgttccagccaccggcccagggcaatgaacacaaagagcatggggggcgtgtcgaagaatgtcacaggggaacgct

SEQ ID NO: 5447 - RNA, 94 nt, synthetic construct
  source 1..94: mol_type = other RNA
gctgttacctttgccaagtgttccagccaccggcccagggcaatgaacacaaagagcatggggggcgtgtcgaagaatgtcacaggagagcgct

SEQ ID NO: 5448 - RNA, 94 nt, synthetic construct
  source 1..94: mol_type = other RNA
gctgttacctttgccaagtgttccagccaccggcccagggcaatgaacacaaagagcatggggggcgtgtcgaagaatgtcacaggcgatctct

SEQ ID NO: 5449 - RNA, 94 nt, synthetic construct
  source 1..94: mol_type = other RNA
gctgttacctttgccaagtgttccagccaccggcccagggcaatgaacacaaagagcatggggggcgtgtcgaagaatgtcacagggctgcgct

SEQ ID NO: 5450 - RNA, 94 nt, synthetic construct
  source 1..94: mol_type = other RNA
gctgttacctttgccaagtgttccagccaccggcccagggcaatgaacacaaagagcatggggggcgtgtcgaagaatgtcacaggagatcgct

SEQ ID NO: 5451 - RNA, 94 nt, synthetic construct
  source 1..94: mol_type = other RNA
gctgttacctttgccaagtgttccagccaccggcccagggcaatgaacacaaagagcatggggggcgtgtcgaagaatgtcacaggcgagcgct

SEQ ID NO: 5452 - RNA, 94 nt, synthetic construct
  source 1..94: mol_type = other RNA
gctgttacctttgccaagtgttccagccaccggcccagggcaatgaacacaaagagcatggggggcgtgtcgaagaatgtcacaggtgaacgct

SEQ ID NO: 5453 - RNA, 94 nt, synthetic construct
  source 1..94: mol_type = other RNA
gctgttacctttgccaagtgttccagccaccggcccagggcaatgaacacaaagagcatggggggcgtgtcgaagaatgtcacagggctacgct

SEQ ID NO: 5454 - RNA, 94 nt, synthetic construct
  source 1..94: mol_type = other RNA
gctgttacctttgccaagtgttccagccaccggcccagggcaatgaacacaaagagcatggggggcgtgtcgaagaatgtcacaggggacctct

SEQ ID NO: 5455 - RNA, 94 nt, synthetic construct
  source 1..94: mol_type = other RNA
gctgttacctttgccaagtgttccagccaccggcccagggcaatgaacacaaagagcatggggggcgtgtcgaagaatgtcacaggcgacctct

SEQ ID NO: 5456 - RNA, 94 nt, synthetic construct
  source 1..94: mol_type = other RNA
gctgttacctttgccaagtgttccagccaccggcccagggcaatgaacacaaagagcatggggggcgtgtcgaagaatgtcacagggctcctct

SEQ ID NO: 5457 - RNA, 94 nt, synthetic construct
  source 1..94: mol_type = other RNA
gctgttacctttgccaagtgttccagccaccggcccagggcaatgaacacaaagagcatggggggcgtgtcgaagaatgtcacagggcttctct

SEQ ID NO: 5458 - RNA, 94 nt, synthetic construct
  source 1..94: mol_type = other RNA
gctgttacctttgccaagtgttccagccaccggcccagggcaatgaacacaaagagcatggggggcgtgtcgaagaatgtcacaggcgaacgct

SEQ ID NO: 5459 - RNA, 94 nt, synthetic construct
  source 1..94: mol_type = other RNA
gctgttacctttgccaagtgttccagccaccggcccagggcaatgaacacaaagagcatggggggcgtgtcgaagaatgtcacaggtgatctct

SEQ ID NO: 5460 - RNA, 94 nt, synthetic construct
  source 1..94: mol_type = other RNA
gctgttacctttgccaagtgttccagccaccggcccagggcaatgaacacaaagagcatggggggcgtgtcgaagaatgtcacaggcgatcgct

SEQ ID NO: 5461 - RNA, 94 nt, synthetic construct
  source 1..94: mol_type = other RNA
gctgttacctttgccaagtgttccagccaccggcccagggcaatgaacacaaagagcatggggggcgtgtcgaagaatgtcacaggagatctct

SEQ ID NO: 5462 - RNA, 94 nt, synthetic construct
  source 1..94: mol_type = other RNA
gctgttacctttgccaagtgttccagccaccggcccagggcaatgaacacaaagagcatggggggcgtgtcgaagaatgtcacaggagacctct

SEQ ID NO: 5463 - RNA, 94 nt, synthetic construct
  source 1..94: mol_type = other RNA
gctgttacctttgccaagtgttccagccaccggcccagggcaatgaacacaaagagcatggggggcgtgtcgaagaatgtcacaggggatcgct

SEQ ID NO: 5464 - RNA, 94 nt, synthetic construct
  source 1..94: mol_type = other RNA
gctgttacctttgccaagtgttccagccaccggcccagggcaatgaacacaaagagcatggggggcgtgtcgaagaatgtcacaggtgatcgct

SEQ ID NO: 5465 - RNA, 94 nt, synthetic construct
  source 1..94: mol_type = other RNA
gctgttacctttgccaagtgttccagccaccggcccagggcaatgaacacaaagagcatggggggcgtgtcgaagaatgtcacaggggatctct

SEQ ID NO: 5466 - RNA, 94 nt, synthetic construct
  source 1..94: mol_type = other RNA
gctgttacctttgccaagtgttccagccaccggcccagggcaatgaacacaaagagcatggggggcgtgtcgaagaatgtcacaggagaacgct

SEQ ID NO: 5467 - RNA, 94 nt, synthetic construct
  source 1..94: mol_type = other RNA
gctgttacctttgccaagtgttccagccaccggcccagggcaatgaacacaaagagcatggggggcgtgtcgaagaatgtcacagggcttcgct

SEQ ID NO: 5468 - RNA, 94 nt, synthetic construct
  source 1..94: mol_type = other RNA
gctgttacctttgccaagtgttccagccaccggcccagggcaatgaacacaaagagcatggggggcgtgtcgaagaatgtcacaggtgacctct

SEQ ID NO: 5469 - RNA, 94 nt, synthetic construct
  source 1..94: mol_type = other RNA
gctgttacctttgccaagtgttccagccaccggcccagggcaatgaacacaaagagcatggggggcgtgtcgaagaatgtcacaggtgagcgct

SEQ ID NO: 5470 - RNA, 94 nt, synthetic construct
  source 1..94: mol_type = other RNA
gctgttacctttgccaagtgttccagccaccggcccagggcaatgaacacaaagagcatggggggcgtgtcgaagaatgtcacaggggagcgct

SEQ ID NO: 5471 - RNA, 95 nt, synthetic construct
  source 1..95: mol_type = other RNA
tgctgttacctttgccaagtgttccagccaccggcccagggcaatgaacacaaagagcatggggggcgtgtcgaagaatgtcacaggtgacctct

SEQ ID NO: 5472 - RNA, 95 nt, synthetic construct
  source 1..95: mol_type = other RNA
tgctgttacctttgccaagtgttccagccaccggcccagggcaatgaacacaaagagcatggggggcgtgtcgaagaatgtcacaggtgatcgct

SEQ ID NO: 5473 - RNA, 95 nt, synthetic construct
  source 1..95: mol_type = other RNA
tgctgttacctttgccaagtgttccagccaccggcccagggcaatgaacacaaagagcatggggggcgtgtcgaagaatgtcacaggagatcgct

SEQ ID NO: 5474 - RNA, 95 nt, synthetic construct
  source 1..95: mol_type = other RNA
tgctgttacctttgccaagtgttccagccaccggcccagggcaatgaacacaaagagcatggggggcgtgtcgaagaatgtcacaggtgatctct

SEQ ID NO: 5475 - RNA, 95 nt, synthetic construct
  source 1..95: mol_type = other RNA
tgctgttacctttgccaagtgttccagccaccggcccagggcaatgaacacaaagagcatggggggcgtgtcgaagaatgtcacaggagaacgct

SEQ ID NO: 5476 - RNA, 95 nt, synthetic construct
  source 1..95: mol_type = other RNA
tgctgttacctttgccaagtgttccagccaccggcccagggcaatgaacacaaagagcatggggggcgtgtcgaagaatgtcacaggcgacctct

SEQ ID NO: 5477 - RNA, 95 nt, synthetic construct
  source 1..95: mol_type = other RNA
tgctgttacctttgccaagtgttccagccaccggcccagggcaatgaacacaaagagcatggggggcgtgtcgaagaatgtcacaggggacctct

SEQ ID NO: 5478 - RNA, 95 nt, synthetic construct
  source 1..95: mol_type = other RNA
tgctgttacctttgccaagtgttccagccaccggcccagggcaatgaacacaaagagcatggggggcgtgtcgaagaatgtcacaggggatcgct

SEQ ID NO: 5479 - RNA, 95 nt, synthetic construct
  source 1..95: mol_type = other RNA
tgctgttacctttgccaagtgttccagccaccggcccagggcaatgaacacaaagagcatggggggcgtgtcgaagaatgtcacaggtgagcgct

SEQ ID NO: 5480 - RNA, 95 nt, synthetic construct
  source 1..95: mol_type = other RNA
tgctgttacctttgccaagtgttccagccaccggcccagggcaatgaacacaaagagcatggggggcgtgtcgaagaatgtcacaggggagcgct

SEQ ID NO: 5481 - RNA, 95 nt, synthetic construct
  source 1..95: mol_type = other RNA
tgctgttacctttgccaagtgttccagccaccggcccagggcaatgaacacaaagagcatggggggcgtgtcgaagaatgtcacagggctgcgct

SEQ ID NO: 5482 - RNA, 95 nt, synthetic construct
  source 1..95: mol_type = other RNA
tgctgttacctttgccaagtgttccagccaccggcccagggcaatgaacacaaagagcatggggggcgtgtcgaagaatgtcacaggagacctct

SEQ ID NO: 5483 - RNA, 95 nt, synthetic construct
  source 1..95: mol_type = other RNA
tgctgttacctttgccaagtgttccagccaccggcccagggcaatgaacacaaagagcatggggggcgtgtcgaagaatgtcacaggagatctct

SEQ ID NO: 5484 - RNA, 95 nt, synthetic construct
  source 1..95: mol_type = other RNA
tgctgttacctttgccaagtgttccagccaccggcccagggcaatgaacacaaagagcatggggggcgtgtcgaagaatgtcacagggcttcgct

SEQ ID NO: 5485 - RNA, 95 nt, synthetic construct
  source 1..95: mol_type = other RNA
tgctgttacctttgccaagtgttccagccaccggcccagggcaatgaacacaaagagcatggggggcgtgtcgaagaatgtcacaggagagcgct

SEQ ID NO: 5486 - RNA, 95 nt, synthetic construct
  source 1..95: mol_type = other RNA
tgctgttacctttgccaagtgttccagccaccggcccagggcaatgaacacaaagagcatggggggcgtgtcgaagaatgtcacagggctcctct

SEQ ID NO: 5487 - RNA, 95 nt, synthetic construct
  source 1..95: mol_type = other RNA
tgctgttacctttgccaagtgttccagccaccggcccagggcaatgaacacaaagagcatggggggcgtgtcgaagaatgtcacaggggaacgct

SEQ ID NO: 5488 - RNA, 95 nt, synthetic construct
  source 1..95: mol_type = other RNA
tgctgttacctttgccaagtgttccagccaccggcccagggcaatgaacacaaagagcatggggggcgtgtcgaagaatgtcacaggggatctct

SEQ ID NO: 5489 - RNA, 95 nt, synthetic construct
  source 1..95: mol_type = other RNA
tgctgttacctttgccaagtgttccagccaccggcccagggcaatgaacacaaagagcatggggggcgtgtcgaagaatgtcacagggcttctct

SEQ ID NO: 5490 - RNA, 95 nt, synthetic construct
  source 1..95: mol_type = other RNA
tgctgttacctttgccaagtgttccagccaccggcccagggcaatgaacacaaagagcatggggggcgtgtcgaagaatgtcacaggcgatctct

SEQ ID NO: 5491 - RNA, 95 nt, synthetic construct
  source 1..95: mol_type = other RNA
tgctgttacctttgccaagtgttccagccaccggcccagggcaatgaacacaaagagcatggggggcgtgtcgaagaatgtcacagggctacgct

SEQ ID NO: 5492 - RNA, 95 nt, synthetic construct
  source 1..95: mol_type = other RNA
tgctgttacctttgccaagtgttccagccaccggcccagggcaatgaacacaaagagcatggggggcgtgtcgaagaatgtcacaggcgaacgct

SEQ ID NO: 5493 - RNA, 95 nt, synthetic construct
  source 1..95: mol_type = other RNA
tgctgttacctttgccaagtgttccagccaccggcccagggcaatgaacacaaagagcatggggggcgtgtcgaagaatgtcacaggtgaacgct

SEQ ID NO: 5494 - RNA, 95 nt, synthetic construct
  source 1..95: mol_type = other RNA
tgctgttacctttgccaagtgttccagccaccggcccagggcaatgaacacaaagagcatggggggcgtgtcgaagaatgtcacaggcgagcgct

SEQ ID NO: 5495 - RNA, 95 nt, synthetic construct
  source 1..95: mol_type = other RNA
tgctgttacctttgccaagtgttccagccaccggcccagggcaatgaacacaaagagcatggggggcgtgtcgaagaatgtcacaggcgatcgct

SEQ ID NO: 5496 - RNA, 96 nt, synthetic construct
  source 1..96: mol_type = other RNA
ctgctgttacctttgccaagtgttccagccaccggcccagggcaatgaacacaaagagcatggggggcgtgtcgaagaatgtcacagggcttctct

SEQ ID NO: 5497 - RNA, 96 nt, synthetic construct
  source 1..96: mol_type = other RNA
ctgctgttacctttgccaagtgttccagccaccggcccagggcaatgaacacaaagagcatggggggcgtgtcgaagaatgtcacagggctgcgct

SEQ ID NO: 5498 - RNA, 96 nt, synthetic construct
  source 1..96: mol_type = other RNA
ctgctgttacctttgccaagtgttccagccaccggcccagggcaatgaacacaaagagcatggggggcgtgtcgaagaatgtcacagggcttcgct

SEQ ID NO: 5499 - RNA, 96 nt, synthetic construct
  source 1..96: mol_type = other RNA
ctgctgttacctttgccaagtgttccagccaccggcccagggcaatgaacacaaagagcatggggggcgtgtcgaagaatgtcacaggggacctct

SEQ ID NO: 5500 - RNA, 96 nt, synthetic construct
  source 1..96: mol_type = other RNA
ctgctgttacctttgccaagtgttccagccaccggcccagggcaatgaacacaaagagcatggggggcgtgtcgaagaatgtcacagggctcctct

SEQ ID NO: 5501 - RNA, 96 nt, synthetic construct
  source 1..96: mol_type = other RNA
ctgctgttacctttgccaagtgttccagccaccggcccagggcaatgaacacaaagagcatggggggcgtgtcgaagaatgtcacaggtgacctct

SEQ ID NO: 5502 - RNA, 96 nt, synthetic construct
  source 1..96: mol_type = other RNA
ctgctgttacctttgccaagtgttccagccaccggcccagggcaatgaacacaaagagcatggggggcgtgtcgaagaatgtcacaggagacctct

SEQ ID NO: 5503 - RNA, 96 nt, synthetic construct
  source 1..96: mol_type = other RNA
ctgctgttacctttgccaagtgttccagccaccggcccagggcaatgaacacaaagagcatggggggcgtgtcgaagaatgtcacaggcgaacgct

SEQ ID NO: 5504 - RNA, 96 nt, synthetic construct
  source 1..96: mol_type = other RNA
ctgctgttacctttgccaagtgttccagccaccggcccagggcaatgaacacaaagagcatggggggcgtgtcgaagaatgtcacaggtgatctct

SEQ ID NO: 5505 - RNA, 96 nt, synthetic construct
  source 1..96: mol_type = other RNA
ctgctgttacctttgccaagtgttccagccaccggcccagggcaatgaacacaaagagcatggggggcgtgtcgaagaatgtcacaggagaacgct

SEQ ID NO: 5506 - RNA, 96 nt, synthetic construct
  source 1..96: mol_type = other RNA
ctgctgttacctttgccaagtgttccagccaccggcccagggcaatgaacacaaagagcatggggggcgtgtcgaagaatgtcacaggcgagcgct

SEQ ID NO: 5507 - RNA, 96 nt, synthetic construct
  source 1..96: mol_type = other RNA
ctgctgttacctttgccaagtgttccagccaccggcccagggcaatgaacacaaagagcatggggggcgtgtcgaagaatgtcacaggtgaacgct

SEQ ID NO: 5508 - RNA, 96 nt, synthetic construct
  source 1..96: mol_type = other RNA
ctgctgttacctttgccaagtgttccagccaccggcccagggcaatgaacacaaagagcatggggggcgtgtcgaagaatgtcacaggagatctct

SEQ ID NO: 5509 - RNA, 96 nt, synthetic construct
  source 1..96: mol_type = other RNA
ctgctgttacctttgccaagtgttccagccaccggcccagggcaatgaacacaaagagcatggggggcgtgtcgaagaatgtcacaggtgagcgct

SEQ ID NO: 5510 - RNA, 96 nt, synthetic construct
  source 1..96: mol_type = other RNA
ctgctgttacctttgccaagtgttccagccaccggcccagggcaatgaacacaaagagcatggggggcgtgtcgaagaatgtcacaggggatctct

SEQ ID NO: 5511 - RNA, 96 nt, synthetic construct
  source 1..96: mol_type = other RNA
ctgctgttacctttgccaagtgttccagccaccggcccagggcaatgaacacaaagagcatggggggcgtgtcgaagaatgtcacaggcgacctct

SEQ ID NO: 5512 - RNA, 96 nt, synthetic construct
  source 1..96: mol_type = other RNA
ctgctgttacctttgccaagtgttccagccaccggcccagggcaatgaacacaaagagcatggggggcgtgtcgaagaatgtcacaggcgatcgct

SEQ ID NO: 5513 - RNA, 96 nt, synthetic construct
  source 1..96: mol_type = other RNA
ctgctgttacctttgccaagtgttccagccaccggcccagggcaatgaacacaaagagcatggggggcgtgtcgaagaatgtcacaggcgatctct

SEQ ID NO: 5514 - RNA, 96 nt, synthetic construct
  source 1..96: mol_type = other RNA
ctgctgttacctttgccaagtgttccagccaccggcccagggcaatgaacacaaagagcatggggggcgtgtcgaagaatgtcacagggctacgct

SEQ ID NO: 5515 - RNA, 96 nt, synthetic construct
  source 1..96: mol_type = other RNA
ctgctgttacctttgccaagtgttccagccaccggcccagggcaatgaacacaaagagcatggggggcgtgtcgaagaatgtcacaggggagcgct

SEQ ID NO: 5516 - RNA, 96 nt, synthetic construct
  source 1..96: mol_type = other RNA
ctgctgttacctttgccaagtgttccagccaccggcccagggcaatgaacacaaagagcatggggggcgtgtcgaagaatgtcacaggtgatcgct

SEQ ID NO: 5517 - RNA, 96 nt, synthetic construct
  source 1..96: mol_type = other RNA
ctgctgttacctttgccaagtgttccagccaccggcccagggcaatgaacacaaagagcatggggggcgtgtcgaagaatgtcacaggggatcgct

SEQ ID NO: 5518 - RNA, 96 nt, synthetic construct
  source 1..96: mol_type = other RNA
ctgctgttacctttgccaagtgttccagccaccggcccagggcaatgaacacaaagagcatggggggcgtgtcgaagaatgtcacaggagatcgct

SEQ ID NO: 5519 - RNA, 96 nt, synthetic construct
  source 1..96: mol_type = other RNA
ctgctgttacctttgccaagtgttccagccaccggcccagggcaatgaacacaaagagcatggggggcgtgtcgaagaatgtcacaggagagcgct

SEQ ID NO: 5520 - RNA, 96 nt, synthetic construct
  source 1..96: mol_type = other RNA
ctgctgttacctttgccaagtgttccagccaccggcccagggcaatgaacacaaagagcatggggggcgtgtcgaagaatgtcacaggggaacgct

SEQ ID NO: 5521 - RNA, 97 nt, synthetic construct
  source 1..97: mol_type = other RNA
gctgctgttacctttgccaagtgttccagccaccggcccagggcaatgaacacaaagagcatggggggcgtgtcgaagaatgtcacaggagatcgct

SEQ ID NO: 5522 - RNA, 97 nt, synthetic construct
  source 1..97: mol_type = other RNA
gctgctgttacctttgccaagtgttccagccaccggcccagggcaatgaacacaaagagcatggggggcgtgtcgaagaatgtcacaggggaacgct

SEQ ID NO: 5523 - RNA, 97 nt, synthetic construct
  source 1..97: mol_type = other RNA
gctgctgttacctttgccaagtgttccagccaccggcccagggcaatgaacacaaagagcatggggggcgtgtcgaagaatgtcacagggcttctct

SEQ ID NO: 5524 - RNA, 97 nt, synthetic construct
  source 1..97: mol_type = other RNA
gctgctgttacctttgccaagtgttccagccaccggcccagggcaatgaacacaaagagcatggggggcgtgtcgaagaatgtcacaggagacctct

SEQ ID NO: 5525 - RNA, 97 nt, synthetic construct
  source 1..97: mol_type = other RNA
gctgctgttacctttgccaagtgttccagccaccggcccagggcaatgaacacaaagagcatggggggcgtgtcgaagaatgtcacaggtgatcgct

SEQ ID NO: 5526 - RNA, 97 nt, synthetic construct
  source 1..97: mol_type = other RNA
gctgctgttacctttgccaagtgttccagccaccggcccagggcaatgaacacaaagagcatggggggcgtgtcgaagaatgtcacaggcgaacgct

SEQ ID NO: 5527 - RNA, 97 nt, synthetic construct
  source 1..97: mol_type = other RNA
gctgctgttacctttgccaagtgttccagccaccggcccagggcaatgaacacaaagagcatggggggcgtgtcgaagaatgtcacagggcttcgct

SEQ ID NO: 5528 - RNA, 97 nt, synthetic construct
  source 1..97: mol_type = other RNA
gctgctgttacctttgccaagtgttccagccaccggcccagggcaatgaacacaaagagcatggggggcgtgtcgaagaatgtcacaggagaacgct

SEQ ID NO: 5529 - RNA, 97 nt, synthetic construct
  source 1..97: mol_type = other RNA
gctgctgttacctttgccaagtgttccagccaccggcccagggcaatgaacacaaagagcatggggggcgtgtcgaagaatgtcacagggctcctct

SEQ ID NO: 5530 - RNA, 97 nt, synthetic construct
  source 1..97: mol_type = other RNA
gctgctgttacctttgccaagtgttccagccaccggcccagggcaatgaacacaaagagcatggggggcgtgtcgaagaatgtcacaggggacctct

SEQ ID NO: 5531 - RNA, 97 nt, synthetic construct
  source 1..97: mol_type = other RNA
gctgctgttacctttgccaagtgttccagccaccggcccagggcaatgaacacaaagagcatggggggcgtgtcgaagaatgtcacaggtgaacgct

SEQ ID NO: 5532 - RNA, 97 nt, synthetic construct
  source 1..97: mol_type = other RNA
gctgctgttacctttgccaagtgttccagccaccggcccagggcaatgaacacaaagagcatggggggcgtgtcgaagaatgtcacaggggatcgct

SEQ ID NO: 5533 - RNA, 97 nt, synthetic construct
  source 1..97: mol_type = other RNA
gctgctgttacctttgccaagtgttccagccaccggcccagggcaatgaacacaaagagcatggggggcgtgtcgaagaatgtcacaggcgacctct

SEQ ID NO: 5534 - RNA, 97 nt, synthetic construct
  source 1..97: mol_type = other RNA
gctgctgttacctttgccaagtgttccagccaccggcccagggcaatgaacacaaagagcatggggggcgtgtcgaagaatgtcacaggcgatctct

SEQ ID NO: 5535 - RNA, 97 nt, synthetic construct
  source 1..97: mol_type = other RNA
gctgctgttacctttgccaagtgttccagccaccggcccagggcaatgaacacaaagagcatggggggcgtgtcgaagaatgtcacaggagatctct

SEQ ID NO: 5536 - RNA, 97 nt, synthetic construct
  source 1..97: mol_type = other RNA
gctgctgttacctttgccaagtgttccagccaccggcccagggcaatgaacacaaagagcatggggggcgtgtcgaagaatgtcacaggggagcgct

SEQ ID NO: 5537 - RNA, 97 nt, synthetic construct
  source 1..97: mol_type = other RNA
gctgctgttacctttgccaagtgttccagccaccggcccagggcaatgaacacaaagagcatggggggcgtgtcgaagaatgtcacaggcgagcgct

SEQ ID NO: 5538 - RNA, 97 nt, synthetic construct
  source 1..97: mol_type = other RNA
gctgctgttacctttgccaagtgttccagccaccggcccagggcaatgaacacaaagagcatggggggcgtgtcgaagaatgtcacaggcgatcgct

SEQ ID NO: 5539 - RNA, 97 nt, synthetic construct
  source 1..97: mol_type = other RNA
gctgctgttacctttgccaagtgttccagccaccggcccagggcaatgaacacaaagagcatggggggcgtgtcgaagaatgtcacagggctgcgct

SEQ ID NO: 5540 - RNA, 97 nt, synthetic construct
  source 1..97: mol_type = other RNA
gctgctgttacctttgccaagtgttccagccaccggcccagggcaatgaacacaaagagcatggggggcgtgtcgaagaatgtcacaggtgacctct

SEQ ID NO: 5541 - RNA, 97 nt, synthetic construct
  source 1..97: mol_type = other RNA
gctgctgttacctttgccaagtgttccagccaccggcccagggcaatgaacacaaagagcatggggggcgtgtcgaagaatgtcacaggagagcgct

SEQ ID NO: 5542 - RNA, 97 nt, synthetic construct
  source 1..97: mol_type = other RNA
gctgctgttacctttgccaagtgttccagccaccggcccagggcaatgaacacaaagagcatggggggcgtgtcgaagaatgtcacaggtgatctct

SEQ ID NO: 5543 - RNA, 97 nt, synthetic construct
  source 1..97: mol_type = other RNA
gctgctgttacctttgccaagtgttccagccaccggcccagggcaatgaacacaaagagcatggggggcgtgtcgaagaatgtcacagggctacgct

SEQ ID NO: 5544 - RNA, 97 nt, synthetic construct
  source 1..97: mol_type = other RNA
gctgctgttacctttgccaagtgttccagccaccggcccagggcaatgaacacaaagagcatggggggcgtgtcgaagaatgtcacaggtgagcgct

SEQ ID NO: 5545 - RNA, 97 nt, synthetic construct
  source 1..97: mol_type = other RNA
gctgctgttacctttgccaagtgttccagccaccggcccagggcaatgaacacaaagagcatggggggcgtgtcgaagaatgtcacaggggatctct

SEQ ID NO: 5546 - RNA, 98 nt, synthetic construct
  source 1..98: mol_type = other RNA
agctgctgttacctttgccaagtgttccagccaccggcccagggcaatgaacacaaagagcatggggggcgtgtcgaagaatgtcacaggagatcgct

SEQ ID NO: 5547 - RNA, 98 nt, synthetic construct
  source 1..98: mol_type = other RNA
agctgctgttacctttgccaagtgttccagccaccggcccagggcaatgaacacaaagagcatggggggcgtgtcgaagaatgtcacaggagacctct

SEQ ID NO: 5548 - RNA, 98 nt, synthetic construct
  source 1..98: mol_type = other RNA
agctgctgttacctttgccaagtgttccagccaccggcccagggcaatgaacacaaagagcatggggggcgtgtcgaagaatgtcacaggggaacgct

SEQ ID NO: 5549 - RNA, 98 nt, synthetic construct
  source 1..98: mol_type = other RNA
agctgctgttacctttgccaagtgttccagccaccggcccagggcaatgaacacaaagagcatggggggcgtgtcgaagaatgtcacaggagatctct

SEQ ID NO: 5550 - RNA, 98 nt, synthetic construct
  source 1..98: mol_type = other RNA
agctgctgttacctttgccaagtgttccagccaccggcccagggcaatgaacacaaagagcatggggggcgtgtcgaagaatgtcacaggcgatctct

SEQ ID NO: 5551 - RNA, 98 nt, synthetic construct
  source 1..98: mol_type = other RNA
agctgctgttacctttgccaagtgttccagccaccggcccagggcaatgaacacaaagagcatggggggcgtgtcgaagaatgtcacaggtgacctct

SEQ ID NO: 5552 - RNA, 98 nt, synthetic construct
  source 1..98: mol_type = other RNA
agctgctgttacctttgccaagtgttccagccaccggcccagggcaatgaacacaaagagcatggggggcgtgtcgaagaatgtcacaggcgacctct

SEQ ID NO: 5553 - RNA, 98 nt, synthetic construct
  source 1..98: mol_type = other RNA
agctgctgttacctttgccaagtgttccagccaccggcccagggcaatgaacacaaagagcatggggggcgtgtcgaagaatgtcacaggtgagcgct

SEQ ID NO: 5554 - RNA, 98 nt, synthetic construct
  source 1..98: mol_type = other RNA
agctgctgttacctttgccaagtgttccagccaccggcccagggcaatgaacacaaagagcatggggggcgtgtcgaagaatgtcacaggggacctct

SEQ ID NO: 5555 - RNA, 98 nt, synthetic construct
  source 1..98: mol_type = other RNA
agctgctgttacctttgccaagtgttccagccaccggcccagggcaatgaacacaaagagcatggggggcgtgtcgaagaatgtcacaggtgatctct

SEQ ID NO: 5556 - RNA, 98 nt, synthetic construct
  source 1..98: mol_type = other RNA
agctgctgttacctttgccaagtgttccagccaccggcccagggcaatgaacacaaagagcatggggggcgtgtcgaagaatgtcacagggctgcgct

SEQ ID NO: 5557 - RNA, 98 nt, synthetic construct
  source 1..98: mol_type = other RNA
agctgctgttacctttgccaagtgttccagccaccggcccagggcaatgaacacaaagagcatggggggcgtgtcgaagaatgtcacagggctcctct

SEQ ID NO: 5558 - RNA, 98 nt, synthetic construct
  source 1..98: mol_type = other RNA
agctgctgttacctttgccaagtgttccagccaccggcccagggcaatgaacacaaagagcatggggggcgtgtcgaagaatgtcacagggcttctct

SEQ ID NO: 5559 - RNA, 98 nt, synthetic construct
  source 1..98: mol_type = other RNA
agctgctgttacctttgccaagtgttccagccaccggcccagggcaatgaacacaaagagcatggggggcgtgtcgaagaatgtcacaggagaacgct

SEQ ID NO: 5560 - RNA, 98 nt, synthetic construct
  source 1..98: mol_type = other RNA
agctgctgttacctttgccaagtgttccagccaccggcccagggcaatgaacacaaagagcatggggggcgtgtcgaagaatgtcacaggtgatcgct

SEQ ID NO: 5561 - RNA, 98 nt, synthetic construct
  source 1..98: mol_type = other RNA
agctgctgttacctttgccaagtgttccagccaccggcccagggcaatgaacacaaagagcatggggggcgtgtcgaagaatgtcacaggcgagcgct

SEQ ID NO: 5562 - RNA, 98 nt, synthetic construct
  source 1..98: mol_type = other RNA
agctgctgttacctttgccaagtgttccagccaccggcccagggcaatgaacacaaagagcatggggggcgtgtcgaagaatgtcacaggggatctct

SEQ ID NO: 5563 - RNA, 98 nt, synthetic construct
  source 1..98: mol_type = other RNA
agctgctgttacctttgccaagtgttccagccaccggcccagggcaatgaacacaaagagcatggggggcgtgtcgaagaatgtcacaggcgatcgct

SEQ ID NO: 5564 - RNA, 98 nt, synthetic construct
  source 1..98: mol_type = other RNA
agctgctgttacctttgccaagtgttccagccaccggcccagggcaatgaacacaaagagcatggggggcgtgtcgaagaatgtcacaggtgaacgct

SEQ ID NO: 5565 - RNA, 98 nt, synthetic construct
  source 1..98: mol_type = other RNA
agctgctgttacctttgccaagtgttccagccaccggcccagggcaatgaacacaaagagcatggggggcgtgtcgaagaatgtcacaggggagcgct

SEQ ID NO: 5566 - RNA, 98 nt, synthetic construct
  source 1..98: mol_type = other RNA
agctgctgttacctttgccaagtgttccagccaccggcccagggcaatgaacacaaagagcatggggggcgtgtcgaagaatgtcacagggcttcgct

SEQ ID NO: 5567 - RNA, 98 nt, synthetic construct
  source 1..98: mol_type = other RNA
agctgctgttacctttgccaagtgttccagccaccggcccagggcaatgaacacaaagagcatggggggcgtgtcgaagaatgtcacagggctacgct

SEQ ID NO: 5568 - RNA, 98 nt, synthetic construct
  source 1..98: mol_type = other RNA
agctgctgttacctttgccaagtgttccagccaccggcccagggcaatgaacacaaagagcatggggggcgtgtcgaagaatgtcacaggagagcgct

SEQ ID NO: 5569 - RNA, 98 nt, synthetic construct
  source 1..98: mol_type = other RNA
agctgctgttacctttgccaagtgttccagccaccggcccagggcaatgaacacaaagagcatggggggcgtgtcgaagaatgtcacaggggatcgct

SEQ ID NO: 5570 - RNA, 98 nt, synthetic construct
  source 1..98: mol_type = other RNA
agctgctgttacctttgccaagtgttccagccaccggcccagggcaatgaacacaaagagcatggggggcgtgtcgaagaatgtcacaggcgaacgct

SEQ ID NO: 5571 - RNA, 99 nt, synthetic construct
  source 1..99: mol_type = other RNA
aagctgctgttacctttgccaagtgttccagccaccggcccagggcaatgaacacaaagagcatggggggcgtgtcgaagaatgtcacaggggatctct

SEQ ID NO: 5572 - RNA, 99 nt, synthetic construct
  source 1..99: mol_type = other RNA
aagctgctgttacctttgccaagtgttccagccaccggcccagggcaatgaacacaaagagcatggggggcgtgtcgaagaatgtcacaggcgatcgct

SEQ ID NO: 5573 - RNA, 99 nt, synthetic construct
  source 1..99: mol_type = other RNA
aagctgctgttacctttgccaagtgttccagccaccggcccagggcaatgaacacaaagagcatggggggcgtgtcgaagaatgtcacaggagatctct

SEQ ID NO: 5574 - RNA, 99 nt, synthetic construct
  source 1..99: mol_type = other RNA
aagctgctgttacctttgccaagtgttccagccaccggcccagggcaatgaacacaaagagcatggggggcgtgtcgaagaatgtcacagggcttcgct

SEQ ID NO: 5575 - RNA, 99 nt, synthetic construct
  source 1..99: mol_type = other RNA
aagctgctgttacctttgccaagtgttccagccaccggcccagggcaatgaacacaaagagcatggggggcgtgtcgaagaatgtcacaggagaacgct

SEQ ID NO: 5576 - RNA, 99 nt, synthetic construct
  source 1..99: mol_type = other RNA
aagctgctgttacctttgccaagtgttccagccaccggcccagggcaatgaacacaaagagcatggggggcgtgtcgaagaatgtcacaggtgatcgct

SEQ ID NO: 5577 - RNA, 99 nt, synthetic construct
  source 1..99: mol_type = other RNA
aagctgctgttacctttgccaagtgttccagccaccggcccagggcaatgaacacaaagagcatggggggcgtgtcgaagaatgtcacaggcgagcgct

SEQ ID NO: 5578 - RNA, 99 nt, synthetic construct
  source 1..99: mol_type = other RNA
aagctgctgttacctttgccaagtgttccagccaccggcccagggcaatgaacacaaagagcatggggggcgtgtcgaagaatgtcacaggtgatctct

SEQ ID NO: 5579 - RNA, 99 nt, synthetic construct
  source 1..99: mol_type = other RNA
aagctgctgttacctttgccaagtgttccagccaccggcccagggcaatgaacacaaagagcatggggggcgtgtcgaagaatgtcacaggagagcgct

SEQ ID NO: 5580 - RNA, 99 nt, synthetic construct
  source 1..99: mol_type = other RNA
aagctgctgttacctttgccaagtgttccagccaccggcccagggcaatgaacacaaagagcatggggggcgtgtcgaagaatgtcacagggctgcgct

SEQ ID NO: 5581 - RNA, 99 nt, synthetic construct
  source 1..99: mol_type = other RNA
aagctgctgttacctttgccaagtgttccagccaccggcccagggcaatgaacacaaagagcatggggggcgtgtcgaagaatgtcacaggggacctct

SEQ ID NO: 5582 - RNA, 99 nt, synthetic construct
  source 1..99: mol_type = other RNA
aagctgctgttacctttgccaagtgttccagccaccggcccagggcaatgaacacaaagagcatggggggcgtgtcgaagaatgtcacaggcgaacgct

SEQ ID NO: 5583 - RNA, 99 nt, synthetic construct
  source 1..99: mol_type = other RNA
aagctgctgttacctttgccaagtgttccagccaccggcccagggcaatgaacacaaagagcatggggggcgtgtcgaagaatgtcacaggtgagcgct

SEQ ID NO: 5584 - RNA, 99 nt, synthetic construct
  source 1..99: mol_type = other RNA
aagctgctgttacctttgccaagtgttccagccaccggcccagggcaatgaacacaaagagcatggggggcgtgtcgaagaatgtcacaggcgatctct

SEQ ID NO: 5585 - RNA, 99 nt, synthetic construct
  source 1..99: mol_type = other RNA
aagctgctgttacctttgccaagtgttccagccaccggcccagggcaatgaacacaaagagcatggggggcgtgtcgaagaatgtcacagggcttctct

SEQ ID NO: 5586 - RNA, 99 nt, synthetic construct
  source 1..99: mol_type = other RNA
aagctgctgttacctttgccaagtgttccagccaccggcccagggcaatgaacacaaagagcatggggggcgtgtcgaagaatgtcacagggctcctct

SEQ ID NO: 5587 - RNA, 99 nt, synthetic construct
  source 1..99: mol_type = other RNA
aagctgctgttacctttgccaagtgttccagccaccggcccagggcaatgaacacaaagagcatggggggcgtgtcgaagaatgtcacaggagatcgct

SEQ ID NO: 5588 - RNA, 99 nt, synthetic construct
  source 1..99: mol_type = other RNA
aagctgctgttacctttgccaagtgttccagccaccggcccagggcaatgaacacaaagagcatggggggcgtgtcgaagaatgtcacaggagacctct

SEQ ID NO: 5589 - RNA, 99 nt, synthetic construct
  source 1..99: mol_type = other RNA
aagctgctgttacctttgccaagtgttccagccaccggcccagggcaatgaacacaaagagcatggggggcgtgtcgaagaatgtcacaggtgacctct

SEQ ID NO: 5590 - RNA, 99 nt, synthetic construct
  source 1..99: mol_type = other RNA
aagctgctgttacctttgccaagtgttccagccaccggcccagggcaatgaacacaaagagcatggggggcgtgtcgaagaatgtcacaggggatcgct

SEQ ID NO: 5591 - RNA, 99 nt, synthetic construct
  source 1..99: mol_type = other RNA
aagctgctgttacctttgccaagtgttccagccaccggcccagggcaatgaacacaaagagcatggggggcgtgtcgaagaatgtcacagggctacgct

SEQ ID NO: 5592 - RNA, 99 nt, synthetic construct
  source 1..99: mol_type = other RNA
aagctgctgttacctttgccaagtgttccagccaccggcccagggcaatgaacacaaagagcatggggggcgtgtcgaagaatgtcacaggggagcgct

SEQ ID NO: 5593 - RNA, 99 nt, synthetic construct
  source 1..99: mol_type = other RNA
aagctgctgttacctttgccaagtgttccagccaccggcccagggcaatgaacacaaagagcatggggggcgtgtcgaagaatgtcacaggggaacgct

SEQ ID NO: 5594 - RNA, 99 nt, synthetic construct
  source 1..99: mol_type = other RNA
aagctgctgttacctttgccaagtgttccagccaccggcccagggcaatgaacacaaagagcatggggggcgtgtcgaagaatgtcacaggtgaacgct

SEQ ID NO: 5595 - RNA, 99 nt, synthetic construct
  source 1..99: mol_type = other RNA
aagctgctgttacctttgccaagtgttccagccaccggcccagggcaatgaacacaaagagcatggggggcgtgtcgaagaatgtcacaggcgacctct

SEQ ID NO: 5596 - RNA, 100 nt, synthetic construct
  source 1..100: mol_type = other RNA
gaagctgctgttacctttgccaagtgttccagccaccggcccagggcaatgaacacaaagagcatggggggcgtgtcgaagaatgtcacaggggatctct

SEQ ID NO: 5597 - RNA, 100 nt, synthetic construct
  source 1..100: mol_type = other RNA
gaagctgctgttacctttgccaagtgttccagccaccggcccagggcaatgaacacaaagagcatggggggcgtgtcgaagaatgtcacagggcttctct

SEQ ID NO: 5598 - RNA, 100 nt, synthetic construct
  source 1..100: mol_type = other RNA
gaagctgctgttacctttgccaagtgttccagccaccggcccagggcaatgaacacaaagagcatggggggcgtgtcgaagaatgtcacaggcgagcgct

SEQ ID NO: 5599 - RNA, 100 nt, synthetic construct
  source 1..100: mol_type = other RNA
gaagctgctgttacctttgccaagtgttccagccaccggcccagggcaatgaacacaaagagcatggggggcgtgtcgaagaatgtcacaggcgatcgct

SEQ ID NO: 5600 - RNA, 100 nt, synthetic construct
  source 1..100: mol_type = other RNA
gaagctgctgttacctttgccaagtgttccagccaccggcccagggcaatgaacacaaagagcatggggggcgtgtcgaagaatgtcacaggtgatcgct

SEQ ID NO: 5601 - RNA, 100 nt, synthetic construct
  source 1..100: mol_type = other RNA
gaagctgctgttacctttgccaagtgttccagccaccggcccagggcaatgaacacaaagagcatggggggcgtgtcgaagaatgtcacaggggacctct

SEQ ID NO: 5602 - RNA, 100 nt, synthetic construct
  source 1..100: mol_type = other RNA
gaagctgctgttacctttgccaagtgttccagccaccggcccagggcaatgaacacaaagagcatggggggcgtgtcgaagaatgtcacagggcttcgct

SEQ ID NO: 5603 - RNA, 100 nt, synthetic construct
  source 1..100: mol_type = other RNA
gaagctgctgttacctttgccaagtgttccagccaccggcccagggcaatgaacacaaagagcatggggggcgtgtcgaagaatgtcacaggggatcgct

SEQ ID NO: 5604 - RNA, 100 nt, synthetic construct
  source 1..100: mol_type = other RNA
gaagctgctgttacctttgccaagtgttccagccaccggcccagggcaatgaacacaaagagcatggggggcgtgtcgaagaatgtcacaggagagcgct

SEQ ID NO: 5605 - RNA, 100 nt, synthetic construct
  source 1..100: mol_type = other RNA
gaagctgctgttacctttgccaagtgttccagccaccggcccagggcaatgaacacaaagagcatggggggcgtgtcgaagaatgtcacaggagaacgct

SEQ ID NO: 5606 - RNA, 100 nt, synthetic construct
  source 1..100: mol_type = other RNA
gaagctgctgttacctttgccaagtgttccagccaccggcccagggcaatgaacacaaagagcatggggggcgtgtcgaagaatgtcacagggctgcgct

SEQ ID NO: 5607 - RNA, 100 nt, synthetic construct
  source 1..100: mol_type = other RNA
gaagctgctgttacctttgccaagtgttccagccaccggcccagggcaatgaacacaaagagcatggggggcgtgtcgaagaatgtcacaggagatctct

SEQ ID NO: 5608 - RNA, 100 nt, synthetic construct
  source 1..100: mol_type = other RNA
gaagctgctgttacctttgccaagtgttccagccaccggcccagggcaatgaacacaaagagcatggggggcgtgtcgaagaatgtcacaggcgaacgct

SEQ ID NO: 5609 - RNA, 100 nt, synthetic construct
  source 1..100: mol_type = other RNA
gaagctgctgttacctttgccaagtgttccagccaccggcccagggcaatgaacacaaagagcatggggggcgtgtcgaagaatgtcacagggctcctct

SEQ ID NO: 5610 - RNA, 100 nt, synthetic construct
  source 1..100: mol_type = other RNA
gaagctgctgttacctttgccaagtgttccagccaccggcccagggcaatgaacacaaagagcatggggggcgtgtcgaagaatgtcacagggctacgct

SEQ ID NO: 5611 - RNA, 100 nt, synthetic construct
  source 1..100: mol_type = other RNA
gaagctgctgttacctttgccaagtgttccagccaccggcccagggcaatgaacacaaagagcatggggggcgtgtcgaagaatgtcacaggagatcgct

SEQ ID NO: 5612 - RNA, 100 nt, synthetic construct
  source 1..100: mol_type = other RNA
gaagctgctgttacctttgccaagtgttccagccaccggcccagggcaatgaacacaaagagcatggggggcgtgtcgaagaatgtcacaggtgaacgct

SEQ ID NO: 5613 - RNA, 100 nt, synthetic construct
  source 1..100: mol_type = other RNA
gaagctgctgttacctttgccaagtgttccagccaccggcccagggcaatgaacacaaagagcatggggggcgtgtcgaagaatgtcacaggggaacgct

SEQ ID NO: 5614 - RNA, 100 nt, synthetic construct
  source 1..100: mol_type = other RNA
gaagctgctgttacctttgccaagtgttccagccaccggcccagggcaatgaacacaaagagcatggggggcgtgtcgaagaatgtcacaggggagcgct

SEQ ID NO: 5615 - RNA, 100 nt, synthetic construct
  source 1..100: mol_type = other RNA
gaagctgctgttacctttgccaagtgttccagccaccggcccagggcaatgaacacaaagagcatggggggcgtgtcgaagaatgtcacaggtgacctct

SEQ ID NO: 5616 - RNA, 100 nt, synthetic construct
  source 1..100: mol_type = other RNA
gaagctgctgttacctttgccaagtgttccagccaccggcccagggcaatgaacacaaagagcatggggggcgtgtcgaagaatgtcacaggcgacctct

SEQ ID NO: 5617 - RNA, 100 nt, synthetic construct
  source 1..100: mol_type = other RNA
gaagctgctgttacctttgccaagtgttccagccaccggcccagggcaatgaacacaaagagcatggggggcgtgtcgaagaatgtcacaggcgatctct

SEQ ID NO: 5618 - RNA, 100 nt, synthetic construct
  source 1..100: mol_type = other RNA
gaagctgctgttacctttgccaagtgttccagccaccggcccagggcaatgaacacaaagagcatggggggcgtgtcgaagaatgtcacaggtgatctct

SEQ ID NO: 5619 - RNA, 100 nt, synthetic construct
  source 1..100: mol_type = other RNA
gaagctgctgttacctttgccaagtgttccagccaccggcccagggcaatgaacacaaagagcatggggggcgtgtcgaagaatgtcacaggtgagcgct

SEQ ID NO: 5620 - RNA, 100 nt, synthetic construct
  source 1..100: mol_type = other RNA
gaagctgctgttacctttgccaagtgttccagccaccggcccagggcaatgaacacaaagagcatggggggcgtgtcgaagaatgtcacaggagacctct

SEQ ID NO: 5621 - RNA, 20 nt, synthetic construct
  source 1..20: mol_type = other RNA
aatgtcacagggctgcgctc

SEQ ID NO: 5622 - RNA, 20 nt, synthetic construct
  source 1..20: mol_type = other RNA
aatgtcacagggcttcgctc

SEQ ID NO: 5623 - RNA, 20 nt, synthetic construct
  source 1..20: mol_type = other RNA
aatgtcacagggctacgctc

SEQ ID NO: 5624 - RNA, 20 nt, synthetic construct
  source 1..20: mol_type = other RNA
aatgtcacagggcttctctc

SEQ ID NO: 5625 - RNA, 16 nt, synthetic construct
  source 1..16: mol_type = other RNA
gcggagaggagccctg

SEQ ID NO: 5626 - RNA, 17 nt, synthetic construct
  source 1..17: mol_type = other RNA
ggcggagaggagccctg

SEQ ID NO: 5627 - RNA, 18 nt, synthetic construct
  source 1..18: mol_type = other RNA
aggcggagaggagccctg

SEQ ID NO: 5628 - RNA, 19 nt, synthetic construct
  source 1..19: mol_type = other RNA
aaggcggagaggagccctg

SEQ ID NO: 5629 - RNA, 20 nt, synthetic construct
  source 1..20: mol_type = other RNA
gaaggcggagaggagccctg

SEQ ID NO: 5630 - RNA, 21 nt, synthetic construct
  source 1..21: mol_type = other RNA
agaaggcggagaggagccctg

SEQ ID NO: 5631 - RNA, 22 nt, synthetic construct
  source 1..22: mol_type = other RNA
gagaaggcggagaggagccctg

SEQ ID NO: 5632-5638 - skipped (7 entries)

SEQ ID NO: 5639 - RNA, 10 nt, synthetic construct
  source 1..10: mol_type = other RNA
ggctcctctc

SEQ ID NO: 5640 - RNA, 11 nt, synthetic construct
  source 1..11: mol_type = other RNA
ggctcctctcc

SEQ ID NO: 5641 - RNA, 12 nt, synthetic construct
  source 1..12: mol_type = other RNA
ggctcctctccg

SEQ ID NO: 5642 - RNA, 13 nt, synthetic construct
  source 1..13: mol_type = other RNA
ggctcctctccgc

SEQ ID NO: 5643 - RNA, 14 nt, synthetic construct
  source 1..14: mol_type = other RNA
ggctcctctccgcc

SEQ ID NO: 5644 - RNA, 15 nt, synthetic construct
  source 1..15: mol_type = other RNA
ggctcctctccgcct

SEQ ID NO: 5645 - RNA, 16 nt, synthetic construct
  source 1..16: mol_type = other RNA
ggctcctctccgcctt

SEQ ID NO: 5646 - RNA, 17 nt, synthetic construct
  source 1..17: mol_type = other RNA
ggctcctctccgccttc

SEQ ID NO: 5647 - RNA, 18 nt, synthetic construct
  source 1..18: mol_type = other RNA
ggctcctctccgccttct

SEQ ID NO: 5648 - RNA, 19 nt, synthetic construct
  source 1..19: mol_type = other RNA
ggctcctctccgccttctc

SEQ ID NO: 5649 - RNA, 55 nt, synthetic construct
  source 1..55: mol_type = other RNA
cggcccagggcaatgaacacaaagagcatggggggcgtgtcgaagaatgttacag

SEQ ID NO: 5650 - RNA, 55 nt, synthetic construct
  source 1..55: mol_type = other RNA
cggcccagggcaatgaacacaaagagcatggggggcgtgtcgaagaatgtcacag

SEQ ID NO: 5651 - RNA, 55 nt, synthetic construct
  source 1..55: mol_type = other RNA
cggcccagggcaatgaacacaaagagcatggggggcgtgtcgaagaatgtgacag

SEQ ID NO: 5652 - RNA, 55 nt, synthetic construct
  source 1..55: mol_type = other RNA
cggcccagggcaatgaacacaaagagcatggggggcgtgtcgaagaatgtaacag

SEQ ID NO: 5653 - RNA, 56 nt, synthetic construct
  source 1..56: mol_type = other RNA
ccggcccagggcaatgaacacaaagagcatggggggcgtgtcgaagaatgttacag

SEQ ID NO: 5654 - RNA, 56 nt, synthetic construct
  source 1..56: mol_type = other RNA
ccggcccagggcaatgaacacaaagagcatggggggcgtgtcgaagaatgtgacag

SEQ ID NO: 5655 - RNA, 56 nt, synthetic construct
  source 1..56: mol_type = other RNA
ccggcccagggcaatgaacacaaagagcatggggggcgtgtcgaagaatgtcacag

SEQ ID NO: 5656 - RNA, 56 nt, synthetic construct
  source 1..56: mol_type = other RNA
ccggcccagggcaatgaacacaaagagcatggggggcgtgtcgaagaatgtaacag

SEQ ID NO: 5657 - RNA, 57 nt, synthetic construct
  source 1..57: mol_type = other RNA
accggcccagggcaatgaacacaaagagcatggggggcgtgtcgaagaatgtcacag

SEQ ID NO: 5658 - RNA, 57 nt, synthetic construct
  source 1..57: mol_type = other RNA
accggcccagggcaatgaacacaaagagcatggggggcgtgtcgaagaatgtaacag

SEQ ID NO: 5659 - RNA, 57 nt, synthetic construct
  source 1..57: mol_type = other RNA
accggcccagggcaatgaacacaaagagcatggggggcgtgtcgaagaatgttacag

SEQ ID NO: 5660 - RNA, 57 nt, synthetic construct
  source 1..57: mol_type = other RNA
accggcccagggcaatgaacacaaagagcatggggggcgtgtcgaagaatgtgacag

SEQ ID NO: 5661 - RNA, 58 nt, synthetic construct
  source 1..58: mol_type = other RNA
caccggcccagggcaatgaacacaaagagcatggggggcgtgtcgaagaatgtaacag

SEQ ID NO: 5662 - RNA, 58 nt, synthetic construct
  source 1..58: mol_type = other RNA
caccggcccagggcaatgaacacaaagagcatggggggcgtgtcgaagaatgttacag

SEQ ID NO: 5663 - RNA, 58 nt, synthetic construct
  source 1..58: mol_type = other RNA
caccggcccagggcaatgaacacaaagagcatggggggcgtgtcgaagaatgtgacag

SEQ ID NO: 5664 - RNA, 58 nt, synthetic construct
  source 1..58: mol_type = other RNA
caccggcccagggcaatgaacacaaagagcatggggggcgtgtcgaagaatgtcacag

SEQ ID NO: 5665 - RNA, 59 nt, synthetic construct
  source 1..59: mol_type = other RNA
ccaccggcccagggcaatgaacacaaagagcatggggggcgtgtcgaagaatgttacag

SEQ ID NO: 5666 - RNA, 59 nt, synthetic construct
  source 1..59: mol_type = other RNA
ccaccggcccagggcaatgaacacaaagagcatggggggcgtgtcgaagaatgtgacag

SEQ ID NO: 5667 - RNA, 59 nt, synthetic construct
  source 1..59: mol_type = other RNA
ccaccggcccagggcaatgaacacaaagagcatggggggcgtgtcgaagaatgtcacag

SEQ ID NO: 5668 - RNA, 59 nt, synthetic construct
  source 1..59: mol_type = other RNA
ccaccggcccagggcaatgaacacaaagagcatggggggcgtgtcgaagaatgtaacag

SEQ ID NO: 5669 - RNA, 60 nt, synthetic construct
  source 1..60: mol_type = other RNA
gccaccggcccagggcaatgaacacaaagagcatggggggcgtgtcgaagaatgtcacag

SEQ ID NO: 5670 - RNA, 60 nt, synthetic construct
  source 1..60: mol_type = other RNA
gccaccggcccagggcaatgaacacaaagagcatggggggcgtgtcgaagaatgttacag

SEQ ID NO: 5671 - RNA, 60 nt, synthetic construct
  source 1..60: mol_type = other RNA
gccaccggcccagggcaatgaacacaaagagcatggggggcgtgtcgaagaatgtgacag

SEQ ID NO: 5672 - RNA, 60 nt, synthetic construct
  source 1..60: mol_type = other RNA
gccaccggcccagggcaatgaacacaaagagcatggggggcgtgtcgaagaatgtaacag

SEQ ID NO: 5673 - RNA, 61 nt, synthetic construct
  source 1..61: mol_type = other RNA
agccaccggcccagggcaatgaacacaaagagcatggggggcgtgtcgaagaatgtaacag

SEQ ID NO: 5674 - RNA, 61 nt, synthetic construct
  source 1..61: mol_type = other RNA
agccaccggcccagggcaatgaacacaaagagcatggggggcgtgtcgaagaatgttacag

SEQ ID NO: 5675 - RNA, 61 nt, synthetic construct
  source 1..61: mol_type = other RNA
agccaccggcccagggcaatgaacacaaagagcatggggggcgtgtcgaagaatgtgacag

SEQ ID NO: 5676 - RNA, 61 nt, synthetic construct
  source 1..61: mol_type = other RNA
agccaccggcccagggcaatgaacacaaagagcatggggggcgtgtcgaagaatgtcacag

SEQ ID NO: 5677 - RNA, 62 nt, synthetic construct
  source 1..62: mol_type = other RNA
cagccaccggcccagggcaatgaacacaaagagcatggggggcgtgtcgaagaatgtaacag

SEQ ID NO: 5678 - RNA, 62 nt, synthetic construct
  source 1..62: mol_type = other RNA
cagccaccggcccagggcaatgaacacaaagagcatggggggcgtgtcgaagaatgttacag

SEQ ID NO: 5679 - RNA, 62 nt, synthetic construct
  source 1..62: mol_type = other RNA
cagccaccggcccagggcaatgaacacaaagagcatggggggcgtgtcgaagaatgtcacag

SEQ ID NO: 5680 - RNA, 62 nt, synthetic construct
  source 1..62: mol_type = other RNA
cagccaccggcccagggcaatgaacacaaagagcatggggggcgtgtcgaagaatgtgacag

SEQ ID NO: 5681 - RNA, 63 nt, synthetic construct
  source 1..63: mol_type = other RNA
ccagccaccggcccagggcaatgaacacaaagagcatggggggcgtgtcgaagaatgtgacag

SEQ ID NO: 5682 - RNA, 63 nt, synthetic construct
  source 1..63: mol_type = other RNA
ccagccaccggcccagggcaatgaacacaaagagcatggggggcgtgtcgaagaatgtcacag

SEQ ID NO: 5683 - RNA, 63 nt, synthetic construct
  source 1..63: mol_type = other RNA
ccagccaccggcccagggcaatgaacacaaagagcatggggggcgtgtcgaagaatgttacag

SEQ ID NO: 5684 - RNA, 63 nt, synthetic construct
  source 1..63: mol_type = other RNA
ccagccaccggcccagggcaatgaacacaaagagcatggggggcgtgtcgaagaatgtaacag

SEQ ID NO: 5685 - RNA, 64 nt, synthetic construct
  source 1..64: mol_type = other RNA
tccagccaccggcccagggcaatgaacacaaagagcatggggggcgtgtcgaagaatgttacag

SEQ ID NO: 5686 - RNA, 64 nt, synthetic construct
  source 1..64: mol_type = other RNA
tccagccaccggcccagggcaatgaacacaaagagcatggggggcgtgtcgaagaatgtaacag

SEQ ID NO: 5687 - RNA, 64 nt, synthetic construct
  source 1..64: mol_type = other RNA
tccagccaccggcccagggcaatgaacacaaagagcatggggggcgtgtcgaagaatgtcacag

SEQ ID NO: 5688 - RNA, 64 nt, synthetic construct
  source 1..64: mol_type = other RNA
tccagccaccggcccagggcaatgaacacaaagagcatggggggcgtgtcgaagaatgtgacag

SEQ ID NO: 5689 - RNA, 65 nt, synthetic construct
  source 1..65: mol_type = other RNA
ttccagccaccggcccagggcaatgaacacaaagagcatggggggcgtgtcgaagaatgttacag

SEQ ID NO: 5690 - RNA, 65 nt, synthetic construct
  source 1..65: mol_type = other RNA
ttccagccaccggcccagggcaatgaacacaaagagcatggggggcgtgtcgaagaatgtgacag

SEQ ID NO: 5691 - RNA, 65 nt, synthetic construct
  source 1..65: mol_type = other RNA
ttccagccaccggcccagggcaatgaacacaaagagcatggggggcgtgtcgaagaatgtaacag

SEQ ID NO: 5692 - RNA, 65 nt, synthetic construct
  source 1..65: mol_type = other RNA
ttccagccaccggcccagggcaatgaacacaaagagcatggggggcgtgtcgaagaatgtcacag

SEQ ID NO: 5693 - RNA, 66 nt, synthetic construct
  source 1..66: mol_type = other RNA
gttccagccaccggcccagggcaatgaacacaaagagcatggggggcgtgtcgaagaatgtgacag

SEQ ID NO: 5694 - RNA, 66 nt, synthetic construct
  source 1..66: mol_type = other RNA
gttccagccaccggcccagggcaatgaacacaaagagcatggggggcgtgtcgaagaatgttacag

SEQ ID NO: 5695 - RNA, 66 nt, synthetic construct
  source 1..66: mol_type = other RNA
gttccagccaccggcccagggcaatgaacacaaagagcatggggggcgtgtcgaagaatgtcacag

SEQ ID NO: 5696 - RNA, 66 nt, synthetic construct
  source 1..66: mol_type = other RNA
gttccagccaccggcccagggcaatgaacacaaagagcatggggggcgtgtcgaagaatgtaacag

SEQ ID NO: 5697 - RNA, 67 nt, synthetic construct
  source 1..67: mol_type = other RNA
tgttccagccaccggcccagggcaatgaacacaaagagcatggggggcgtgtcgaagaatgttacag

SEQ ID NO: 5698 - RNA, 67 nt, synthetic construct
  source 1..67: mol_type = other RNA
tgttccagccaccggcccagggcaatgaacacaaagagcatggggggcgtgtcgaagaatgtgacag

SEQ ID NO: 5699 - RNA, 67 nt, synthetic construct
  source 1..67: mol_type = other RNA
tgttccagccaccggcccagggcaatgaacacaaagagcatggggggcgtgtcgaagaatgtaacag

SEQ ID NO: 5700 - RNA, 67 nt, synthetic construct
  source 1..67: mol_type = other RNA
tgttccagccaccggcccagggcaatgaacacaaagagcatggggggcgtgtcgaagaatgtcacag

SEQ ID NO: 5701 - RNA, 68 nt, synthetic construct
  source 1..68: mol_type = other RNA
gtgttccagccaccggcccagggcaatgaacacaaagagcatggggggcgtgtcgaagaatgtaacag

SEQ ID NO: 5702 - RNA, 68 nt, synthetic construct
  source 1..68: mol_type = other RNA
gtgttccagccaccggcccagggcaatgaacacaaagagcatggggggcgtgtcgaagaatgtgacag

SEQ ID NO: 5703 - RNA, 68 nt, synthetic construct
  source 1..68: mol_type = other RNA
gtgttccagccaccggcccagggcaatgaacacaaagagcatggggggcgtgtcgaagaatgtcacag

SEQ ID NO: 5704 - RNA, 68 nt, synthetic construct
  source 1..68: mol_type = other RNA
gtgttccagccaccggcccagggcaatgaacacaaagagcatggggggcgtgtcgaagaatgttacag

SEQ ID NO: 5705 - RNA, 69 nt, synthetic construct
  source 1..69: mol_type = other RNA
agtgttccagccaccggcccagggcaatgaacacaaagagcatggggggcgtgtcgaagaatgtaacag

SEQ ID NO: 5706 - RNA, 69 nt, synthetic construct
  source 1..69: mol_type = other RNA
agtgttccagccaccggcccagggcaatgaacacaaagagcatggggggcgtgtcgaagaatgtgacag

SEQ ID NO: 5707 - RNA, 69 nt, synthetic construct
  source 1..69: mol_type = other RNA
agtgttccagccaccggcccagggcaatgaacacaaagagcatggggggcgtgtcgaagaatgtcacag

SEQ ID NO: 5708 - RNA, 69 nt, synthetic construct
  source 1..69: mol_type = other RNA
agtgttccagccaccggcccagggcaatgaacacaaagagcatggggggcgtgtcgaagaatgttacag

SEQ ID NO: 5709 - RNA, 70 nt, synthetic construct
  source 1..70: mol_type = other RNA
aagtgttccagccaccggcccagggcaatgaacacaaagagcatggggggcgtgtcgaagaatgtgacag

SEQ ID NO: 5710 - RNA, 70 nt, synthetic construct
  source 1..70: mol_type = other RNA
aagtgttccagccaccggcccagggcaatgaacacaaagagcatggggggcgtgtcgaagaatgtaacag

SEQ ID NO: 5711 - RNA, 70 nt, synthetic construct
  source 1..70: mol_type = other RNA
aagtgttccagccaccggcccagggcaatgaacacaaagagcatggggggcgtgtcgaagaatgtcacag

SEQ ID NO: 5712 - RNA, 70 nt, synthetic construct
  source 1..70: mol_type = other RNA
aagtgttccagccaccggcccagggcaatgaacacaaagagcatggggggcgtgtcgaagaatgttacag

SEQ ID NO: 5713 - RNA, 71 nt, synthetic construct
  source 1..71: mol_type = other RNA
caagtgttccagccaccggcccagggcaatgaacacaaagagcatggggggcgtgtcgaagaatgttacag

SEQ ID NO: 5714 - RNA, 71 nt, synthetic construct
  source 1..71: mol_type = other RNA
caagtgttccagccaccggcccagggcaatgaacacaaagagcatggggggcgtgtcgaagaatgtaacag

SEQ ID NO: 5715 - RNA, 71 nt, synthetic construct
  source 1..71: mol_type = other RNA
caagtgttccagccaccggcccagggcaatgaacacaaagagcatggggggcgtgtcgaagaatgtgacag

SEQ ID NO: 5716 - RNA, 71 nt, synthetic construct
  source 1..71: mol_type = other RNA
caagtgttccagccaccggcccagggcaatgaacacaaagagcatggggggcgtgtcgaagaatgtcacag

SEQ ID NO: 5717 - RNA, 72 nt, synthetic construct
  source 1..72: mol_type = other RNA
ccaagtgttccagccaccggcccagggcaatgaacacaaagagcatggggggcgtgtcgaagaatgtcacag

SEQ ID NO: 5718 - RNA, 72 nt, synthetic construct
  source 1..72: mol_type = other RNA
ccaagtgttccagccaccggcccagggcaatgaacacaaagagcatggggggcgtgtcgaagaatgtgacag

SEQ ID NO: 5719 - RNA, 72 nt, synthetic construct
  source 1..72: mol_type = other RNA
ccaagtgttccagccaccggcccagggcaatgaacacaaagagcatggggggcgtgtcgaagaatgtaacag

SEQ ID NO: 5720 - RNA, 72 nt, synthetic construct
  source 1..72: mol_type = other RNA
ccaagtgttccagccaccggcccagggcaatgaacacaaagagcatggggggcgtgtcgaagaatgttacag

SEQ ID NO: 5721 - RNA, 73 nt, synthetic construct
  source 1..73: mol_type = other RNA
gccaagtgttccagccaccggcccagggcaatgaacacaaagagcatggggggcgtgtcgaagaatgtcacag

SEQ ID NO: 5722 - RNA, 73 nt, synthetic construct
  source 1..73: mol_type = other RNA
gccaagtgttccagccaccggcccagggcaatgaacacaaagagcatggggggcgtgtcgaagaatgtgacag

SEQ ID NO: 5723 - RNA, 73 nt, synthetic construct
  source 1..73: mol_type = other RNA
gccaagtgttccagccaccggcccagggcaatgaacacaaagagcatggggggcgtgtcgaagaatgttacag

SEQ ID NO: 5724 - RNA, 73 nt, synthetic construct
  source 1..73: mol_type = other RNA
gccaagtgttccagccaccggcccagggcaatgaacacaaagagcatggggggcgtgtcgaagaatgtaacag

SEQ ID NO: 5725 - RNA, 74 nt, synthetic construct
  source 1..74: mol_type = other RNA
tgccaagtgttccagccaccggcccagggcaatgaacacaaagagcatggggggcgtgtcgaagaatgttacag

SEQ ID NO: 5726 - RNA, 74 nt, synthetic construct
  source 1..74: mol_type = other RNA
tgccaagtgttccagccaccggcccagggcaatgaacacaaagagcatggggggcgtgtcgaagaatgtaacag

SEQ ID NO: 5727 - RNA, 74 nt, synthetic construct
  source 1..74: mol_type = other RNA
tgccaagtgttccagccaccggcccagggcaatgaacacaaagagcatggggggcgtgtcgaagaatgtgacag

SEQ ID NO: 5728 - RNA, 74 nt, synthetic construct
  source 1..74: mol_type = other RNA
tgccaagtgttccagccaccggcccagggcaatgaacacaaagagcatggggggcgtgtcgaagaatgtcacag

SEQ ID NO: 5729 - RNA, 75 nt, synthetic construct
  source 1..75: mol_type = other RNA
ttgccaagtgttccagccaccggcccagggcaatgaacacaaagagcatggggggcgtgtcgaagaatgttacag

SEQ ID NO: 5730 - RNA, 75 nt, synthetic construct
  source 1..75: mol_type = other RNA
ttgccaagtgttccagccaccggcccagggcaatgaacacaaagagcatggggggcgtgtcgaagaatgtcacag

SEQ ID NO: 5731 - RNA, 75 nt, synthetic construct
  source 1..75: mol_type = other RNA
ttgccaagtgttccagccaccggcccagggcaatgaacacaaagagcatggggggcgtgtcgaagaatgtaacag

SEQ ID NO: 5732 - RNA, 75 nt, synthetic construct
  source 1..75: mol_type = other RNA
ttgccaagtgttccagccaccggcccagggcaatgaacacaaagagcatggggggcgtgtcgaagaatgtgacag

SEQ ID NO: 5733 - RNA, 76 nt, synthetic construct
  source 1..76: mol_type = other RNA
tttgccaagtgttccagccaccggcccagggcaatgaacacaaagagcatggggggcgtgtcgaagaatgttacag

SEQ ID NO: 5734 - RNA, 76 nt, synthetic construct
  source 1..76: mol_type = other RNA
tttgccaagtgttccagccaccggcccagggcaatgaacacaaagagcatggggggcgtgtcgaagaatgtcacag

SEQ ID NO: 5735 - RNA, 76 nt, synthetic construct
  source 1..76: mol_type = other RNA
tttgccaagtgttccagccaccggcccagggcaatgaacacaaagagcatggggggcgtgtcgaagaatgtaacag

SEQ ID NO: 5736 - RNA, 76 nt, synthetic construct
  source 1..76: mol_type = other RNA
tttgccaagtgttccagccaccggcccagggcaatgaacacaaagagcatggggggcgtgtcgaagaatgtgacag

SEQ ID NO: 5737 - RNA, 77 nt, synthetic construct
  source 1..77: mol_type = other RNA
ctttgccaagtgttccagccaccggcccagggcaatgaacacaaagagcatggggggcgtgtcgaagaatgtcacag

SEQ ID NO: 5738 - RNA, 77 nt, synthetic construct
  source 1..77: mol_type = other RNA
ctttgccaagtgttccagccaccggcccagggcaatgaacacaaagagcatggggggcgtgtcgaagaatgtaacag

SEQ ID NO: 5739 - RNA, 77 nt, synthetic construct
  source 1..77: mol_type = other RNA
ctttgccaagtgttccagccaccggcccagggcaatgaacacaaagagcatggggggcgtgtcgaagaatgttacag

SEQ ID NO: 5740 - RNA, 77 nt, synthetic construct
  source 1..77: mol_type = other RNA
ctttgccaagtgttccagccaccggcccagggcaatgaacacaaagagcatggggggcgtgtcgaagaatgtgacag

SEQ ID NO: 5741 - RNA, 78 nt, synthetic construct
  source 1..78: mol_type = other RNA
cctttgccaagtgttccagccaccggcccagggcaatgaacacaaagagcatggggggcgtgtcgaagaatgtcacag

SEQ ID NO: 5742 - RNA, 78 nt, synthetic construct
  source 1..78: mol_type = other RNA
cctttgccaagtgttccagccaccggcccagggcaatgaacacaaagagcatggggggcgtgtcgaagaatgtaacag

SEQ ID NO: 5743 - RNA, 78 nt, synthetic construct
  source 1..78: mol_type = other RNA
cctttgccaagtgttccagccaccggcccagggcaatgaacacaaagagcatggggggcgtgtcgaagaatgttacag

SEQ ID NO: 5744 - RNA, 78 nt, synthetic construct
  source 1..78: mol_type = other RNA
cctttgccaagtgttccagccaccggcccagggcaatgaacacaaagagcatggggggcgtgtcgaagaatgtgacag

SEQ ID NO: 5745 - RNA, 79 nt, synthetic construct
  source 1..79: mol_type = other RNA
acctttgccaagtgttccagccaccggcccagggcaatgaacacaaagagcatggggggcgtgtcgaagaatgtaacag

SEQ ID NO: 5746 - RNA, 79 nt, synthetic construct
  source 1..79: mol_type = other RNA
acctttgccaagtgttccagccaccggcccagggcaatgaacacaaagagcatggggggcgtgtcgaagaatgtgacag

SEQ ID NO: 5747 - RNA, 79 nt, synthetic construct
  source 1..79: mol_type = other RNA
acctttgccaagtgttccagccaccggcccagggcaatgaacacaaagagcatggggggcgtgtcgaagaatgtcacag

SEQ ID NO: 5748 - RNA, 79 nt, synthetic construct
  source 1..79: mol_type = other RNA
acctttgccaagtgttccagccaccggcccagggcaatgaacacaaagagcatggggggcgtgtcgaagaatgttacag

SEQ ID NO: 5749 - RNA, 80 nt, synthetic construct
  source 1..80: mol_type = other RNA
tacctttgccaagtgttccagccaccggcccagggcaatgaacacaaagagcatggggggcgtgtcgaagaatgtgacag

SEQ ID NO: 5750 - RNA, 80 nt, synthetic construct
  source 1..80: mol_type = other RNA
tacctttgccaagtgttccagccaccggcccagggcaatgaacacaaagagcatggggggcgtgtcgaagaatgttacag

SEQ ID NO: 5751 - RNA, 80 nt, synthetic construct
  source 1..80: mol_type = other RNA
tacctttgccaagtgttccagccaccggcccagggcaatgaacacaaagagcatggggggcgtgtcgaagaatgtcacag

SEQ ID NO: 5752 - RNA, 80 nt, synthetic construct
  source 1..80: mol_type = other RNA
tacctttgccaagtgttccagccaccggcccagggcaatgaacacaaagagcatggggggcgtgtcgaagaatgtaacag

SEQ ID NO: 5753 - RNA, 81 nt, synthetic construct
  source 1..81: mol_type = other RNA
ttacctttgccaagtgttccagccaccggcccagggcaatgaacacaaagagcatggggggcgtgtcgaagaatgttacag

SEQ ID NO: 5754 - RNA, 81 nt, synthetic construct
  source 1..81: mol_type = other RNA
ttacctttgccaagtgttccagccaccggcccagggcaatgaacacaaagagcatggggggcgtgtcgaagaatgtaacag

SEQ ID NO: 5755 - RNA, 81 nt, synthetic construct
  source 1..81: mol_type = other RNA
ttacctttgccaagtgttccagccaccggcccagggcaatgaacacaaagagcatggggggcgtgtcgaagaatgtgacag

SEQ ID NO: 5756 - RNA, 81 nt, synthetic construct
  source 1..81: mol_type = other RNA
ttacctttgccaagtgttccagccaccggcccagggcaatgaacacaaagagcatggggggcgtgtcgaagaatgtcacag

SEQ ID NO: 5757 - RNA, 82 nt, synthetic construct
  source 1..82: mol_type = other RNA
gttacctttgccaagtgttccagccaccggcccagggcaatgaacacaaagagcatggggggcgtgtcgaagaatgtcacag

SEQ ID NO: 5758 - RNA, 82 nt, synthetic construct
  source 1..82: mol_type = other RNA
gttacctttgccaagtgttccagccaccggcccagggcaatgaacacaaagagcatggggggcgtgtcgaagaatgttacag

SEQ ID NO: 5759 - RNA, 82 nt, synthetic construct
  source 1..82: mol_type = other RNA
gttacctttgccaagtgttccagccaccggcccagggcaatgaacacaaagagcatggggggcgtgtcgaagaatgtaacag

SEQ ID NO: 5760 - RNA, 82 nt, synthetic construct
  source 1..82: mol_type = other RNA
gttacctttgccaagtgttccagccaccggcccagggcaatgaacacaaagagcatggggggcgtgtcgaagaatgtgacag

SEQ ID NO: 5761 - RNA, 83 nt, synthetic construct
  source 1..83: mol_type = other RNA
tgttacctttgccaagtgttccagccaccggcccagggcaatgaacacaaagagcatggggggcgtgtcgaagaatgttacag

SEQ ID NO: 5762 - RNA, 83 nt, synthetic construct
  source 1..83: mol_type = other RNA
tgttacctttgccaagtgttccagccaccggcccagggcaatgaacacaaagagcatggggggcgtgtcgaagaatgtaacag

SEQ ID NO: 5763 - RNA, 83 nt, synthetic construct
  source 1..83: mol_type = other RNA
tgttacctttgccaagtgttccagccaccggcccagggcaatgaacacaaagagcatggggggcgtgtcgaagaatgtcacag

SEQ ID NO: 5764 - RNA, 83 nt, synthetic construct
  source 1..83: mol_type = other RNA
tgttacctttgccaagtgttccagccaccggcccagggcaatgaacacaaagagcatggggggcgtgtcgaagaatgtgacag

SEQ ID NO: 5765 - RNA, 84 nt, synthetic construct
  source 1..84: mol_type = other RNA
ctgttacctttgccaagtgttccagccaccggcccagggcaatgaacacaaagagcatggggggcgtgtcgaagaatgttacag

SEQ ID NO: 5766 - RNA, 84 nt, synthetic construct
  source 1..84: mol_type = other RNA
ctgttacctttgccaagtgttccagccaccggcccagggcaatgaacacaaagagcatggggggcgtgtcgaagaatgtaacag

SEQ ID NO: 5767 - RNA, 84 nt, synthetic construct
  source 1..84: mol_type = other RNA
ctgttacctttgccaagtgttccagccaccggcccagggcaatgaacacaaagagcatggggggcgtgtcgaagaatgtgacag

SEQ ID NO: 5768 - RNA, 84 nt, synthetic construct
  source 1..84: mol_type = other RNA
ctgttacctttgccaagtgttccagccaccggcccagggcaatgaacacaaagagcatggggggcgtgtcgaagaatgtcacag

SEQ ID NO: 5769 - RNA, 85 nt, synthetic construct
  source 1..85: mol_type = other RNA
gctgttacctttgccaagtgttccagccaccggcccagggcaatgaacacaaagagcatggggggcgtgtcgaagaatgttacag

SEQ ID NO: 5770 - RNA, 85 nt, synthetic construct
  source 1..85: mol_type = other RNA
gctgttacctttgccaagtgttccagccaccggcccagggcaatgaacacaaagagcatggggggcgtgtcgaagaatgtgacag

SEQ ID NO: 5771 - RNA, 85 nt, synthetic construct
  source 1..85: mol_type = other RNA
gctgttacctttgccaagtgttccagccaccggcccagggcaatgaacacaaagagcatggggggcgtgtcgaagaatgtcacag

SEQ ID NO: 5772 - RNA, 85 nt, synthetic construct
  source 1..85: mol_type = other RNA
gctgttacctttgccaagtgttccagccaccggcccagggcaatgaacacaaagagcatggggggcgtgtcgaagaatgtaacag

SEQ ID NO: 5773 - RNA, 86 nt, synthetic construct
  source 1..86: mol_type = other RNA
tgctgttacctttgccaagtgttccagccaccggcccagggcaatgaacacaaagagcatggggggcgtgtcgaagaatgtgacag

SEQ ID NO: 5774 - RNA, 86 nt, synthetic construct
  source 1..86: mol_type = other RNA
tgctgttacctttgccaagtgttccagccaccggcccagggcaatgaacacaaagagcatggggggcgtgtcgaagaatgttacag

SEQ ID NO: 5775 - RNA, 86 nt, synthetic construct
  source 1..86: mol_type = other RNA
tgctgttacctttgccaagtgttccagccaccggcccagggcaatgaacacaaagagcatggggggcgtgtcgaagaatgtaacag

SEQ ID NO: 5776 - RNA, 86 nt, synthetic construct
  source 1..86: mol_type = other RNA
tgctgttacctttgccaagtgttccagccaccggcccagggcaatgaacacaaagagcatggggggcgtgtcgaagaatgtcacag

SEQ ID NO: 5777 - RNA, 87 nt, synthetic construct
  source 1..87: mol_type = other RNA
ctgctgttacctttgccaagtgttccagccaccggcccagggcaatgaacacaaagagcatggggggcgtgtcgaagaatgtcacag

SEQ ID NO: 5778 - RNA, 87 nt, synthetic construct
  source 1..87: mol_type = other RNA
ctgctgttacctttgccaagtgttccagccaccggcccagggcaatgaacacaaagagcatggggggcgtgtcgaagaatgttacag

SEQ ID NO: 5779 - RNA, 87 nt, synthetic construct
  source 1..87: mol_type = other RNA
ctgctgttacctttgccaagtgttccagccaccggcccagggcaatgaacacaaagagcatggggggcgtgtcgaagaatgtgacag

SEQ ID NO: 5780 - RNA, 87 nt, synthetic construct
  source 1..87: mol_type = other RNA
ctgctgttacctttgccaagtgttccagccaccggcccagggcaatgaacacaaagagcatggggggcgtgtcgaagaatgtaacag

SEQ ID NO: 5781 - RNA, 88 nt, synthetic construct
  source 1..88: mol_type = other RNA
gctgctgttacctttgccaagtgttccagccaccggcccagggcaatgaacacaaagagcatggggggcgtgtcgaagaatgtgacag

SEQ ID NO: 5782 - RNA, 88 nt, synthetic construct
  source 1..88: mol_type = other RNA
gctgctgttacctttgccaagtgttccagccaccggcccagggcaatgaacacaaagagcatggggggcgtgtcgaagaatgtaacag

SEQ ID NO: 5783 - RNA, 88 nt, synthetic construct
  source 1..88: mol_type = other RNA
gctgctgttacctttgccaagtgttccagccaccggcccagggcaatgaacacaaagagcatggggggcgtgtcgaagaatgtcacag

SEQ ID NO: 5784 - RNA, 88 nt, synthetic construct
  source 1..88: mol_type = other RNA
gctgctgttacctttgccaagtgttccagccaccggcccagggcaatgaacacaaagagcatggggggcgtgtcgaagaatgttacag

SEQ ID NO: 5785 - RNA, 89 nt, synthetic construct
  source 1..89: mol_type = other RNA
agctgctgttacctttgccaagtgttccagccaccggcccagggcaatgaacacaaagagcatggggggcgtgtcgaagaatgtcacag

SEQ ID NO: 5786 - RNA, 89 nt, synthetic construct
  source 1..89: mol_type = other RNA
agctgctgttacctttgccaagtgttccagccaccggcccagggcaatgaacacaaagagcatggggggcgtgtcgaagaatgttacag

SEQ ID NO: 5787 - RNA, 89 nt, synthetic construct
  source 1..89: mol_type = other RNA
agctgctgttacctttgccaagtgttccagccaccggcccagggcaatgaacacaaagagcatggggggcgtgtcgaagaatgtgacag

SEQ ID NO: 5788 - RNA, 89 nt, synthetic construct
  source 1..89: mol_type = other RNA
agctgctgttacctttgccaagtgttccagccaccggcccagggcaatgaacacaaagagcatggggggcgtgtcgaagaatgtaacag

SEQ ID NO: 5789 - RNA, 90 nt, synthetic construct
  source 1..90: mol_type = other RNA
aagctgctgttacctttgccaagtgttccagccaccggcccagggcaatgaacacaaagagcatggggggcgtgtcgaagaatgtgacag

SEQ ID NO: 5790 - RNA, 90 nt, synthetic construct
  source 1..90: mol_type = other RNA
aagctgctgttacctttgccaagtgttccagccaccggcccagggcaatgaacacaaagagcatggggggcgtgtcgaagaatgtcacag

SEQ ID NO: 5791 - RNA, 90 nt, synthetic construct
  source 1..90: mol_type = other RNA
aagctgctgttacctttgccaagtgttccagccaccggcccagggcaatgaacacaaagagcatggggggcgtgtcgaagaatgttacag

SEQ ID NO: 5792 - RNA, 90 nt, synthetic construct
  source 1..90: mol_type = other RNA
aagctgctgttacctttgccaagtgttccagccaccggcccagggcaatgaacacaaagagcatggggggcgtgtcgaagaatgtaacag

SEQ ID NO: 5793 - RNA, 91 nt, synthetic construct
  source 1..91: mol_type = other RNA
gaagctgctgttacctttgccaagtgttccagccaccggcccagggcaatgaacacaaagagcatggggggcgtgtcgaagaatgtcacag

SEQ ID NO: 5794 - RNA, 91 nt, synthetic construct
  source 1..91: mol_type = other RNA
gaagctgctgttacctttgccaagtgttccagccaccggcccagggcaatgaacacaaagagcatggggggcgtgtcgaagaatgtgacag

SEQ ID NO: 5795 - RNA, 91 nt, synthetic construct
  source 1..91: mol_type = other RNA
gaagctgctgttacctttgccaagtgttccagccaccggcccagggcaatgaacacaaagagcatggggggcgtgtcgaagaatgttacag

SEQ ID NO: 5796 - RNA, 91 nt, synthetic construct
  source 1..91: mol_type = other RNA
gaagctgctgttacctttgccaagtgttccagccaccggcccagggcaatgaacacaaagagcatggggggcgtgtcgaagaatgtaacag

SEQ ID NO: 5797 - RNA, 92 nt, synthetic construct
  source 1..92: mol_type = other RNA
tgaagctgctgttacctttgccaagtgttccagccaccggcccagggcaatgaacacaaagagcatggggggcgtgtcgaagaatgttacag

SEQ ID NO: 5798 - RNA, 92 nt, synthetic construct
  source 1..92: mol_type = other RNA
tgaagctgctgttacctttgccaagtgttccagccaccggcccagggcaatgaacacaaagagcatggggggcgtgtcgaagaatgtaacag

SEQ ID NO: 5799 - RNA, 92 nt, synthetic construct
  source 1..92: mol_type = other RNA
tgaagctgctgttacctttgccaagtgttccagccaccggcccagggcaatgaacacaaagagcatggggggcgtgtcgaagaatgtgacag

SEQ ID NO: 5800 - RNA, 92 nt, synthetic construct
  source 1..92: mol_type = other RNA
tgaagctgctgttacctttgccaagtgttccagccaccggcccagggcaatgaacacaaagagcatggggggcgtgtcgaagaatgtcacag

SEQ ID NO: 5801 - RNA, 93 nt, synthetic construct
  source 1..93: mol_type = other RNA
ctgaagctgctgttacctttgccaagtgttccagccaccggcccagggcaatgaacacaaagagcatggggggcgtgtcgaagaatgtaacag

SEQ ID NO: 5802 - RNA, 93 nt, synthetic construct
  source 1..93: mol_type = other RNA
ctgaagctgctgttacctttgccaagtgttccagccaccggcccagggcaatgaacacaaagagcatggggggcgtgtcgaagaatgtcacag

SEQ ID NO: 5803 - RNA, 93 nt, synthetic construct
  source 1..93: mol_type = other RNA
ctgaagctgctgttacctttgccaagtgttccagccaccggcccagggcaatgaacacaaagagcatggggggcgtgtcgaagaatgttacag

SEQ ID NO: 5804 - RNA, 93 nt, synthetic construct
  source 1..93: mol_type = other RNA
ctgaagctgctgttacctttgccaagtgttccagccaccggcccagggcaatgaacacaaagagcatggggggcgtgtcgaagaatgtgacag

SEQ ID NO: 5805 - RNA, 94 nt, synthetic construct
  source 1..94: mol_type = other RNA
cctgaagctgctgttacctttgccaagtgttccagccaccggcccagggcaatgaacacaaagagcatggggggcgtgtcgaagaatgttacag

SEQ ID NO: 5806 - RNA, 94 nt, synthetic construct
  source 1..94: mol_type = other RNA
cctgaagctgctgttacctttgccaagtgttccagccaccggcccagggcaatgaacacaaagagcatggggggcgtgtcgaagaatgtgacag

SEQ ID NO: 5807 - RNA, 94 nt, synthetic construct
  source 1..94: mol_type = other RNA
cctgaagctgctgttacctttgccaagtgttccagccaccggcccagggcaatgaacacaaagagcatggggggcgtgtcgaagaatgtcacag

SEQ ID NO: 5808 - RNA, 94 nt, synthetic construct
  source 1..94: mol_type = other RNA
cctgaagctgctgttacctttgccaagtgttccagccaccggcccagggcaatgaacacaaagagcatggggggcgtgtcgaagaatgtaacag

SEQ ID NO: 5809 - RNA, 95 nt, synthetic construct
  source 1..95: mol_type = other RNA
acctgaagctgctgttacctttgccaagtgttccagccaccggcccagggcaatgaacacaaagagcatggggggcgtgtcgaagaatgtcacag

SEQ ID NO: 5810 - RNA, 95 nt, synthetic construct
  source 1..95: mol_type = other RNA
acctgaagctgctgttacctttgccaagtgttccagccaccggcccagggcaatgaacacaaagagcatggggggcgtgtcgaagaatgtaacag

SEQ ID NO: 5811 - RNA, 95 nt, synthetic construct
  source 1..95: mol_type = other RNA
acctgaagctgctgttacctttgccaagtgttccagccaccggcccagggcaatgaacacaaagagcatggggggcgtgtcgaagaatgtgacag

SEQ ID NO: 5812 - RNA, 95 nt, synthetic construct
  source 1..95: mol_type = other RNA
acctgaagctgctgttacctttgccaagtgttccagccaccggcccagggcaatgaacacaaagagcatggggggcgtgtcgaagaatgttacag

SEQ ID NO: 5813 - RNA, 96 nt, synthetic construct
  source 1..96: mol_type = other RNA
aacctgaagctgctgttacctttgccaagtgttccagccaccggcccagggcaatgaacacaaagagcatggggggcgtgtcgaagaatgttacag

SEQ ID NO: 5814 - RNA, 96 nt, synthetic construct
  source 1..96: mol_type = other RNA
aacctgaagctgctgttacctttgccaagtgttccagccaccggcccagggcaatgaacacaaagagcatggggggcgtgtcgaagaatgtgacag

SEQ ID NO: 5815 - RNA, 96 nt, synthetic construct
  source 1..96: mol_type = other RNA
aacctgaagctgctgttacctttgccaagtgttccagccaccggcccagggcaatgaacacaaagagcatggggggcgtgtcgaagaatgtcacag

SEQ ID NO: 5816 - RNA, 96 nt, synthetic construct
  source 1..96: mol_type = other RNA
aacctgaagctgctgttacctttgccaagtgttccagccaccggcccagggcaatgaacacaaagagcatggggggcgtgtcgaagaatgtaacag

SEQ ID NO: 5817 - RNA, 97 nt, synthetic construct
  source 1..97: mol_type = other RNA
gaacctgaagctgctgttacctttgccaagtgttccagccaccggcccagggcaatgaacacaaagagcatggggggcgtgtcgaagaatgtaacag

SEQ ID NO: 5818 - RNA, 97 nt, synthetic construct
  source 1..97: mol_type = other RNA
gaacctgaagctgctgttacctttgccaagtgttccagccaccggcccagggcaatgaacacaaagagcatggggggcgtgtcgaagaatgtcacag

SEQ ID NO: 5819 - RNA, 97 nt, synthetic construct
  source 1..97: mol_type = other RNA
gaacctgaagctgctgttacctttgccaagtgttccagccaccggcccagggcaatgaacacaaagagcatggggggcgtgtcgaagaatgtgacag

SEQ ID NO: 5820 - RNA, 97 nt, synthetic construct
  source 1..97: mol_type = other RNA
gaacctgaagctgctgttacctttgccaagtgttccagccaccggcccagggcaatgaacacaaagagcatggggggcgtgtcgaagaatgttacag

SEQ ID NO: 5821 - RNA, 98 nt, synthetic construct
  source 1..98: mol_type = other RNA
tgaacctgaagctgctgttacctttgccaagtgttccagccaccggcccagggcaatgaacacaaagagcatggggggcgtgtcgaagaatgtgacag

SEQ ID NO: 5822 - RNA, 98 nt, synthetic construct
  source 1..98: mol_type = other RNA
tgaacctgaagctgctgttacctttgccaagtgttccagccaccggcccagggcaatgaacacaaagagcatggggggcgtgtcgaagaatgttacag

SEQ ID NO: 5823 - RNA, 98 nt, synthetic construct
  source 1..98: mol_type = other RNA
tgaacctgaagctgctgttacctttgccaagtgttccagccaccggcccagggcaatgaacacaaagagcatggggggcgtgtcgaagaatgtcacag

SEQ ID NO: 5824 - RNA, 98 nt, synthetic construct
  source 1..98: mol_type = other RNA
tgaacctgaagctgctgttacctttgccaagtgttccagccaccggcccagggcaatgaacacaaagagcatggggggcgtgtcgaagaatgtaacag

SEQ ID NO: 5825 - RNA, 99 nt, synthetic construct
  source 1..99: mol_type = other RNA
ctgaacctgaagctgctgttacctttgccaagtgttccagccaccggcccagggcaatgaacacaaagagcatggggggcgtgtcgaagaatgtaacag

SEQ ID NO: 5826 - RNA, 99 nt, synthetic construct
  source 1..99: mol_type = other RNA
ctgaacctgaagctgctgttacctttgccaagtgttccagccaccggcccagggcaatgaacacaaagagcatggggggcgtgtcgaagaatgtgacag

SEQ ID NO: 5827 - RNA, 99 nt, synthetic construct
  source 1..99: mol_type = other RNA
ctgaacctgaagctgctgttacctttgccaagtgttccagccaccggcccagggcaatgaacacaaagagcatggggggcgtgtcgaagaatgtcacag

SEQ ID NO: 5828 - RNA, 99 nt, synthetic construct
  source 1..99: mol_type = other RNA
ctgaacctgaagctgctgttacctttgccaagtgttccagccaccggcccagggcaatgaacacaaagagcatggggggcgtgtcgaagaatgttacag

SEQ ID NO: 5829 - RNA, 100 nt, synthetic construct
  source 1..100: mol_type = other RNA
tctgaacctgaagctgctgttacctttgccaagtgttccagccaccggcccagggcaatgaacacaaagagcatggggggcgtgtcgaagaatgtaacag

SEQ ID NO: 5830 - RNA, 100 nt, synthetic construct
  source 1..100: mol_type = other RNA
tctgaacctgaagctgctgttacctttgccaagtgttccagccaccggcccagggcaatgaacacaaagagcatggggggcgtgtcgaagaatgtcacag

SEQ ID NO: 5831 - RNA, 100 nt, synthetic construct
  source 1..100: mol_type = other RNA
tctgaacctgaagctgctgttacctttgccaagtgttccagccaccggcccagggcaatgaacacaaagagcatggggggcgtgtcgaagaatgttacag

SEQ ID NO: 5832 - RNA, 100 nt, synthetic construct
  source 1..100: mol_type = other RNA
tctgaacctgaagctgctgttacctttgccaagtgttccagccaccggcccagggcaatgaacacaaagagcatggggggcgtgtcgaagaatgtgacag

SEQ ID NO: 5833 - RNA, 20 nt, synthetic construct
  source 1..20: mol_type = other RNA
cgtgtcgaagaatgtaacag

SEQ ID NO: 5834 - RNA, 20 nt, synthetic construct
  source 1..20: mol_type = other RNA
gcgtgtcgaagaatgtgaca

SEQ ID NO: 5835 - RNA, 20 nt, synthetic construct
  source 1..20: mol_type = other RNA
cgtgtcgaagaatgtgacag

SEQ ID NO: 5836 - RNA, 20 nt, synthetic construct
  source 1..20: mol_type = other RNA
gcgtgtcgaagaatgtaaca

SEQ ID NO: 5837 - RNA, 20 nt, synthetic construct
  source 1..20: mol_type = other RNA
ggcgtgtcgaagaatgtgac

SEQ ID NO: 5838 - RNA, 20 nt, synthetic construct
  source 1..20: mol_type = other RNA
cgtgtcgaagaatgttacag

SEQ ID NO: 5839 - RNA, 20 nt, synthetic construct
  source 1..20: mol_type = other RNA
ggcgtgtcgaagaatgtaac

SEQ ID NO: 5840 - RNA, 20 nt, synthetic construct
  source 1..20: mol_type = other RNA
gcgtgtcgaagaatgttaca

SEQ ID NO: 5841 - RNA, 20 nt, synthetic construct
  source 1..20: mol_type = other RNA
ggcgtgtcgaagaatgttac

SEQ ID NO: 5842 - RNA, 16 nt, synthetic construct
  source 1..16: mol_type = other RNA
gccctgtgacattctt

SEQ ID NO: 5843 - RNA, 17 nt, synthetic construct
  source 1..17: mol_type = other RNA
agccctgtgacattctt

SEQ ID NO: 5844 - RNA, 18 nt, synthetic construct
  source 1..18: mol_type = other RNA
gagccctgtgacattctt

SEQ ID NO: 5845 - RNA, 19 nt, synthetic construct
  source 1..19: mol_type = other RNA
ggagccctgtgacattctt

SEQ ID NO: 5846 - RNA, 20 nt, synthetic construct
  source 1..20: mol_type = other RNA
aggagccctgtgacattctt

SEQ ID NO: 5847 - RNA, 21 nt, synthetic construct
  source 1..21: mol_type = other RNA
gaggagccctgtgacattctt

SEQ ID NO: 5848 - RNA, 22 nt, synthetic construct
  source 1..22: mol_type = other RNA
agaggagccctgtgacattctt

SEQ ID NO: 5849-5855 - skipped (7 entries)

SEQ ID NO: 5856 - RNA, 10 nt, synthetic construct
  source 1..10: mol_type = other RNA
aatgtcacag

SEQ ID NO: 5857 - RNA, 11 nt, synthetic construct
  source 1..11: mol_type = other RNA
aatgtcacagg

SEQ ID NO: 5858 - RNA, 12 nt, synthetic construct
  source 1..12: mol_type = other RNA
aatgtcacaggg

SEQ ID NO: 5859 - RNA, 13 nt, synthetic construct
  source 1..13: mol_type = other RNA
aatgtcacagggc

SEQ ID NO: 5860 - RNA, 14 nt, synthetic construct
  source 1..14: mol_type = other RNA
aatgtcacagggct

SEQ ID NO: 5861 - RNA, 15 nt, synthetic construct
  source 1..15: mol_type = other RNA
aatgtcacagggctc

SEQ ID NO: 5862 - RNA, 16 nt, synthetic construct
  source 1..16: mol_type = other RNA
aatgtcacagggctcc

SEQ ID NO: 5863 - RNA, 17 nt, synthetic construct
  source 1..17: mol_type = other RNA
aatgtcacagggctcct

SEQ ID NO: 5864 - RNA, 18 nt, synthetic construct
  source 1..18: mol_type = other RNA
aatgtcacagggctcctc

SEQ ID NO: 5865 - RNA, 19 nt, synthetic construct
  source 1..19: mol_type = other RNA
aatgtcacagggctcctct

SEQ ID NO: 5866 - RNA, 45 nt, synthetic construct
  source 1..45: mol_type = other RNA
cggcccagggcaatgaacacaaagagcatggggggcgtgtcgaag

SEQ ID NO: 5867 - RNA, 46 nt, synthetic construct
  source 1..46: mol_type = other RNA
ccggcccagggcaatgaacacaaagagcatggggggcgtgtcgaag

SEQ ID NO: 5868 - RNA, 47 nt, synthetic construct
  source 1..47: mol_type = other RNA
accggcccagggcaatgaacacaaagagcatggggggcgtgtcgaag

SEQ ID NO: 5869 - RNA, 48 nt, synthetic construct
  source 1..48: mol_type = other RNA
caccggcccagggcaatgaacacaaagagcatggggggcgtgtcgaag

SEQ ID NO: 5870 - RNA, 49 nt, synthetic construct
  source 1..49: mol_type = other RNA
ccaccggcccagggcaatgaacacaaagagcatggggggcgtgtcgaag

SEQ ID NO: 5871 - RNA, 50 nt, synthetic construct
  source 1..50: mol_type = other RNA
gccaccggcccagggcaatgaacacaaagagcatggggggcgtgtcgaag

SEQ ID NO: 5872 - RNA, 51 nt, synthetic construct
  source 1..51: mol_type = other RNA
agccaccggcccagggcaatgaacacaaagagcatggggggcgtgtcgaag

SEQ ID NO: 5873 - RNA, 52 nt, synthetic construct
  source 1..52: mol_type = other RNA
cagccaccggcccagggcaatgaacacaaagagcatggggggcgtgtcgaag

SEQ ID NO: 5874 - RNA, 53 nt, synthetic construct
  source 1..53: mol_type = other RNA
ccagccaccggcccagggcaatgaacacaaagagcatggggggcgtgtcgaag

SEQ ID NO: 5875 - RNA, 54 nt, synthetic construct
  source 1..54: mol_type = other RNA
tccagccaccggcccagggcaatgaacacaaagagcatggggggcgtgtcgaag

SEQ ID NO: 5876 - RNA, 55 nt, synthetic construct
  source 1..55: mol_type = other RNA
ttccagccaccggcccagggcaatgaacacaaagagcatggggggcgtgtcgaag

SEQ ID NO: 5877 - RNA, 56 nt, synthetic construct
  source 1..56: mol_type = other RNA
gttccagccaccggcccagggcaatgaacacaaagagcatggggggcgtgtcgaag

SEQ ID NO: 5878 - RNA, 57 nt, synthetic construct
  source 1..57: mol_type = other RNA
tgttccagccaccggcccagggcaatgaacacaaagagcatggggggcgtgtcgaag

SEQ ID NO: 5879 - RNA, 58 nt, synthetic construct
  source 1..58: mol_type = other RNA
gtgttccagccaccggcccagggcaatgaacacaaagagcatggggggcgtgtcgaag

SEQ ID NO: 5880 - RNA, 59 nt, synthetic construct
  source 1..59: mol_type = other RNA
agtgttccagccaccggcccagggcaatgaacacaaagagcatggggggcgtgtcgaag

SEQ ID NO: 5881 - RNA, 60 nt, synthetic construct
  source 1..60: mol_type = other RNA
aagtgttccagccaccggcccagggcaatgaacacaaagagcatggggggcgtgtcgaag

SEQ ID NO: 5882 - RNA, 61 nt, synthetic construct
  source 1..61: mol_type = other RNA
caagtgttccagccaccggcccagggcaatgaacacaaagagcatggggggcgtgtcgaag

SEQ ID NO: 5883 - RNA, 62 nt, synthetic construct
  source 1..62: mol_type = other RNA
ccaagtgttccagccaccggcccagggcaatgaacacaaagagcatggggggcgtgtcgaag

SEQ ID NO: 5884 - RNA, 63 nt, synthetic construct
  source 1..63: mol_type = other RNA
gccaagtgttccagccaccggcccagggcaatgaacacaaagagcatggggggcgtgtcgaag

SEQ ID NO: 5885 - RNA, 64 nt, synthetic construct
  source 1..64: mol_type = other RNA
tgccaagtgttccagccaccggcccagggcaatgaacacaaagagcatggggggcgtgtcgaag

SEQ ID NO: 5886 - RNA, 65 nt, synthetic construct
  source 1..65: mol_type = other RNA
ttgccaagtgttccagccaccggcccagggcaatgaacacaaagagcatggggggcgtgtcgaag

SEQ ID NO: 5887 - RNA, 66 nt, synthetic construct
  source 1..66: mol_type = other RNA
tttgccaagtgttccagccaccggcccagggcaatgaacacaaagagcatggggggcgtgtcgaag

SEQ ID NO: 5888 - RNA, 67 nt, synthetic construct
  source 1..67: mol_type = other RNA
ctttgccaagtgttccagccaccggcccagggcaatgaacacaaagagcatggggggcgtgtcgaag

SEQ ID NO: 5889 - RNA, 68 nt, synthetic construct
  source 1..68: mol_type = other RNA
cctttgccaagtgttccagccaccggcccagggcaatgaacacaaagagcatggggggcgtgtcgaag

SEQ ID NO: 5890 - RNA, 69 nt, synthetic construct
  source 1..69: mol_type = other RNA
acctttgccaagtgttccagccaccggcccagggcaatgaacacaaagagcatggggggcgtgtcgaag

SEQ ID NO: 5891 - RNA, 70 nt, synthetic construct
  source 1..70: mol_type = other RNA
tacctttgccaagtgttccagccaccggcccagggcaatgaacacaaagagcatggggggcgtgtcgaag

SEQ ID NO: 5892 - RNA, 71 nt, synthetic construct
  source 1..71: mol_type = other RNA
ttacctttgccaagtgttccagccaccggcccagggcaatgaacacaaagagcatggggggcgtgtcgaag

SEQ ID NO: 5893 - RNA, 72 nt, synthetic construct
  source 1..72: mol_type = other RNA
gttacctttgccaagtgttccagccaccggcccagggcaatgaacacaaagagcatggggggcgtgtcgaag

SEQ ID NO: 5894 - RNA, 73 nt, synthetic construct
  source 1..73: mol_type = other RNA
tgttacctttgccaagtgttccagccaccggcccagggcaatgaacacaaagagcatggggggcgtgtcgaag

SEQ ID NO: 5895 - RNA, 74 nt, synthetic construct
  source 1..74: mol_type = other RNA
ctgttacctttgccaagtgttccagccaccggcccagggcaatgaacacaaagagcatggggggcgtgtcgaag

SEQ ID NO: 5896 - RNA, 75 nt, synthetic construct
  source 1..75: mol_type = other RNA
gctgttacctttgccaagtgttccagccaccggcccagggcaatgaacacaaagagcatggggggcgtgtcgaag

SEQ ID NO: 5897 - RNA, 76 nt, synthetic construct
  source 1..76: mol_type = other RNA
tgctgttacctttgccaagtgttccagccaccggcccagggcaatgaacacaaagagcatggggggcgtgtcgaag

SEQ ID NO: 5898 - RNA, 77 nt, synthetic construct
  source 1..77: mol_type = other RNA
ctgctgttacctttgccaagtgttccagccaccggcccagggcaatgaacacaaagagcatggggggcgtgtcgaag

SEQ ID NO: 5899 - RNA, 78 nt, synthetic construct
  source 1..78: mol_type = other RNA
gctgctgttacctttgccaagtgttccagccaccggcccagggcaatgaacacaaagagcatggggggcgtgtcgaag

SEQ ID NO: 5900 - RNA, 79 nt, synthetic construct
  source 1..79: mol_type = other RNA
agctgctgttacctttgccaagtgttccagccaccggcccagggcaatgaacacaaagagcatggggggcgtgtcgaag

SEQ ID NO: 5901 - RNA, 80 nt, synthetic construct
  source 1..80: mol_type = other RNA
aagctgctgttacctttgccaagtgttccagccaccggcccagggcaatgaacacaaagagcatggggggcgtgtcgaag

SEQ ID NO: 5902 - RNA, 81 nt, synthetic construct
  source 1..81: mol_type = other RNA
gaagctgctgttacctttgccaagtgttccagccaccggcccagggcaatgaacacaaagagcatggggggcgtgtcgaag

SEQ ID NO: 5903 - RNA, 82 nt, synthetic construct
  source 1..82: mol_type = other RNA
tgaagctgctgttacctttgccaagtgttccagccaccggcccagggcaatgaacacaaagagcatggggggcgtgtcgaag

SEQ ID NO: 5904 - RNA, 83 nt, synthetic construct
  source 1..83: mol_type = other RNA
ctgaagctgctgttacctttgccaagtgttccagccaccggcccagggcaatgaacacaaagagcatggggggcgtgtcgaag

SEQ ID NO: 5905 - RNA, 84 nt, synthetic construct
  source 1..84: mol_type = other RNA
cctgaagctgctgttacctttgccaagtgttccagccaccggcccagggcaatgaacacaaagagcatggggggcgtgtcgaag

SEQ ID NO: 5906 - RNA, 85 nt, synthetic construct
  source 1..85: mol_type = other RNA
acctgaagctgctgttacctttgccaagtgttccagccaccggcccagggcaatgaacacaaagagcatggggggcgtgtcgaag

SEQ ID NO: 5907 - RNA, 86 nt, synthetic construct
  source 1..86: mol_type = other RNA
aacctgaagctgctgttacctttgccaagtgttccagccaccggcccagggcaatgaacacaaagagcatggggggcgtgtcgaag

SEQ ID NO: 5908 - RNA, 87 nt, synthetic construct
  source 1..87: mol_type = other RNA
gaacctgaagctgctgttacctttgccaagtgttccagccaccggcccagggcaatgaacacaaagagcatggggggcgtgtcgaag

SEQ ID NO: 5909 - RNA, 88 nt, synthetic construct
  source 1..88: mol_type = other RNA
tgaacctgaagctgctgttacctttgccaagtgttccagccaccggcccagggcaatgaacacaaagagcatggggggcgtgtcgaag

SEQ ID NO: 5910 - RNA, 89 nt, synthetic construct
  source 1..89: mol_type = other RNA
ctgaacctgaagctgctgttacctttgccaagtgttccagccaccggcccagggcaatgaacacaaagagcatggggggcgtgtcgaag

SEQ ID NO: 5911 - RNA, 90 nt, synthetic construct
  source 1..90: mol_type = other RNA
tctgaacctgaagctgctgttacctttgccaagtgttccagccaccggcccagggcaatgaacacaaagagcatggggggcgtgtcgaag

SEQ ID NO: 5912 - RNA, 91 nt, synthetic construct
  source 1..91: mol_type = other RNA
ttctgaacctgaagctgctgttacctttgccaagtgttccagccaccggcccagggcaatgaacacaaagagcatggggggcgtgtcgaag

SEQ ID NO: 5913 - RNA, 92 nt, synthetic construct
  source 1..92: mol_type = other RNA
tttctgaacctgaagctgctgttacctttgccaagtgttccagccaccggcccagggcaatgaacacaaagagcatggggggcgtgtcgaag

SEQ ID NO: 5914 - RNA, 93 nt, synthetic construct
  source 1..93: mol_type = other RNA
ttttctgaacctgaagctgctgttacctttgccaagtgttccagccaccggcccagggcaatgaacacaaagagcatggggggcgtgtcgaag

SEQ ID NO: 5915 - RNA, 94 nt, synthetic construct
  source 1..94: mol_type = other RNA
cttttctgaacctgaagctgctgttacctttgccaagtgttccagccaccggcccagggcaatgaacacaaagagcatggggggcgtgtcgaag

SEQ ID NO: 5916 - RNA, 95 nt, synthetic construct
  source 1..95: mol_type = other RNA
tcttttctgaacctgaagctgctgttacctttgccaagtgttccagccaccggcccagggcaatgaacacaaagagcatggggggcgtgtcgaag

SEQ ID NO: 5917 - RNA, 96 nt, synthetic construct
  source 1..96: mol_type = other RNA
ctcttttctgaacctgaagctgctgttacctttgccaagtgttccagccaccggcccagggcaatgaacacaaagagcatggggggcgtgtcgaag

SEQ ID NO: 5918 - RNA, 97 nt, synthetic construct
  source 1..97: mol_type = other RNA
gctcttttctgaacctgaagctgctgttacctttgccaagtgttccagccaccggcccagggcaatgaacacaaagagcatggggggcgtgtcgaag

SEQ ID NO: 5919 - RNA, 98 nt, synthetic construct
  source 1..98: mol_type = other RNA
agctcttttctgaacctgaagctgctgttacctttgccaagtgttccagccaccggcccagggcaatgaacacaaagagcatggggggcgtgtcgaag

SEQ ID NO: 5920 - RNA, 99 nt, synthetic construct
  source 1..99: mol_type = other RNA
cagctcttttctgaacctgaagctgctgttacctttgccaagtgttccagccaccggcccagggcaatgaacacaaagagcatggggggcgtgtcgaag

SEQ ID NO: 5921 - RNA, 100 nt, synthetic construct
  source 1..100: mol_type = other RNA
gcagctcttttctgaacctgaagctgctgttacctttgccaagtgttccagccaccggcccagggcaatgaacacaaagagcatggggggcgtgtcgaag

SEQ ID NO: 5922 - RNA, 16 nt, synthetic construct
  source 1..16: mol_type = other RNA
tctaaacatggtgttc

SEQ ID NO: 5923 - RNA, 17 nt, synthetic construct
  source 1..17: mol_type = other RNA
ttctaaacatggtgttc

SEQ ID NO: 5924 - RNA, 18 nt, synthetic construct
  source 1..18: mol_type = other RNA
attctaaacatggtgttc

SEQ ID NO: 5925 - RNA, 19 nt, synthetic construct
  source 1..19: mol_type = other RNA
aattctaaacatggtgttc

SEQ ID NO: 5926 - RNA, 20 nt, synthetic construct
  source 1..20: mol_type = other RNA
taattctaaacatggtgttc

SEQ ID NO: 5927 - RNA, 21 nt, synthetic construct
  source 1..21: mol_type = other RNA
gtaattctaaacatggtgttc

SEQ ID NO: 5928 - RNA, 22 nt, synthetic construct
  source 1..22: mol_type = other RNA
agtaattctaaacatggtgttc

SEQ ID NO: 5929-5935 - skipped (7 entries)

SEQ ID NO: 5936 - RNA, 10 nt, synthetic construct
  source 1..10: mol_type = other RNA
caccatgttt

SEQ ID NO: 5937 - RNA, 11 nt, synthetic construct
  source 1..11: mol_type = other RNA
caccatgttta

SEQ ID NO: 5938 - RNA, 12 nt, synthetic construct
  source 1..12: mol_type = other RNA
caccatgtttag

SEQ ID NO: 5939 - RNA, 13 nt, synthetic construct
  source 1..13: mol_type = other RNA
caccatgtttaga

SEQ ID NO: 5940 - RNA, 14 nt, synthetic construct
  source 1..14: mol_type = other RNA
caccatgtttagaa

SEQ ID NO: 5941 - RNA, 15 nt, synthetic construct
  source 1..15: mol_type = other RNA
caccatgtttagaat

SEQ ID NO: 5942 - RNA, 16 nt, synthetic construct
  source 1..16: mol_type = other RNA
caccatgtttagaatt

SEQ ID NO: 5943 - RNA, 17 nt, synthetic construct
  source 1..17: mol_type = other RNA
caccatgtttagaatta

SEQ ID NO: 5944 - RNA, 18 nt, synthetic construct
  source 1..18: mol_type = other RNA
caccatgtttagaattac

SEQ ID NO: 5945 - RNA, 19 nt, synthetic construct
  source 1..19: mol_type = other RNA
caccatgtttagaattact

SEQ ID NO: 5946 - RNA, 88 nt, synthetic construct
  source 1..88: mol_type = other RNA
ggtggctggaacacttggcaaaggtaacagcagcttcaggttcagaaaagagctgctccttcagtaaacaaatctcacttcctctgaa

SEQ ID NO: 5947 - RNA, 89 nt, synthetic construct
  source 1..89: mol_type = other RNA
cggtggctggaacacttggcaaaggtaacagcagcttcaggttcagaaaagagctgctccttcagtaaacaaatctcacttcctctgaa

SEQ ID NO: 5948 - RNA, 90 nt, synthetic construct
  source 1..90: mol_type = other RNA
ccggtggctggaacacttggcaaaggtaacagcagcttcaggttcagaaaagagctgctccttcagtaaacaaatctcacttcctctgaa

SEQ ID NO: 5949 - RNA, 91 nt, synthetic construct
  source 1..91: mol_type = other RNA
gccggtggctggaacacttggcaaaggtaacagcagcttcaggttcagaaaagagctgctccttcagtaaacaaatctcacttcctctgaa

SEQ ID NO: 5950 - RNA, 92 nt, synthetic construct
  source 1..92: mol_type = other RNA
ggccggtggctggaacacttggcaaaggtaacagcagcttcaggttcagaaaagagctgctccttcagtaaacaaatctcacttcctctgaa

SEQ ID NO: 5951 - RNA, 93 nt, synthetic construct
  source 1..93: mol_type = other RNA
gggccggtggctggaacacttggcaaaggtaacagcagcttcaggttcagaaaagagctgctccttcagtaaacaaatctcacttcctctgaa

SEQ ID NO: 5952 - RNA, 94 nt, synthetic construct
  source 1..94: mol_type = other RNA
tgggccggtggctggaacacttggcaaaggtaacagcagcttcaggttcagaaaagagctgctccttcagtaaacaaatctcacttcctctgaa

SEQ ID NO: 5953 - RNA, 95 nt, synthetic construct
  source 1..95: mol_type = other RNA
ctgggccggtggctggaacacttggcaaaggtaacagcagcttcaggttcagaaaagagctgctccttcagtaaacaaatctcacttcctctgaa

SEQ ID NO: 5954 - RNA, 96 nt, synthetic construct
  source 1..96: mol_type = other RNA
cctgggccggtggctggaacacttggcaaaggtaacagcagcttcaggttcagaaaagagctgctccttcagtaaacaaatctcacttcctctgaa

SEQ ID NO: 5955 - RNA, 97 nt, synthetic construct
  source 1..97: mol_type = other RNA
ccctgggccggtggctggaacacttggcaaaggtaacagcagcttcaggttcagaaaagagctgctccttcagtaaacaaatctcacttcctctgaa

SEQ ID NO: 5956 - RNA, 98 nt, synthetic construct
  source 1..98: mol_type = other RNA
gccctgggccggtggctggaacacttggcaaaggtaacagcagcttcaggttcagaaaagagctgctccttcagtaaacaaatctcacttcctctgaa

SEQ ID NO: 5957 - RNA, 99 nt, synthetic construct
  source 1..99: mol_type = other RNA
tgccctgggccggtggctggaacacttggcaaaggtaacagcagcttcaggttcagaaaagagctgctccttcagtaaacaaatctcacttcctctgaa

SEQ ID NO: 5958 - RNA, 100 nt, synthetic construct
  source 1..100: mol_type = other RNA
ttgccctgggccggtggctggaacacttggcaaaggtaacagcagcttcaggttcagaaaagagctgctccttcagtaaacaaatctcacttcctctgaa

SEQ ID NO: 5959 - RNA, 16 nt, synthetic construct
  source 1..16: mol_type = other RNA
aaacatggtgttcaga

SEQ ID NO: 5960 - RNA, 17 nt, synthetic construct
  source 1..17: mol_type = other RNA
taaacatggtgttcaga

SEQ ID NO: 5961 - RNA, 18 nt, synthetic construct
  source 1..18: mol_type = other RNA
ctaaacatggtgttcaga

SEQ ID NO: 5962 - RNA, 19 nt, synthetic construct
  source 1..19: mol_type = other RNA
tctaaacatggtgttcaga

SEQ ID NO: 5963 - RNA, 20 nt, synthetic construct
  source 1..20: mol_type = other RNA
ttctaaacatggtgttcaga

SEQ ID NO: 5964 - RNA, 21 nt, synthetic construct
  source 1..21: mol_type = other RNA
attctaaacatggtgttcaga

SEQ ID NO: 5965 - RNA, 22 nt, synthetic construct
  source 1..22: mol_type = other RNA
aattctaaacatggtgttcaga

SEQ ID NO: 5966-5972 - skipped (7 entries)

SEQ ID NO: 5973 - RNA, 10 nt, synthetic construct
  source 1..10: mol_type = other RNA
gaacaccatg

SEQ ID NO: 5974 - RNA, 11 nt, synthetic construct
  source 1..11: mol_type = other RNA
gaacaccatgt

SEQ ID NO: 5975 - RNA, 12 nt, synthetic construct
  source 1..12: mol_type = other RNA
gaacaccatgtt

SEQ ID NO: 5976 - RNA, 13 nt, synthetic construct
  source 1..13: mol_type = other RNA
gaacaccatgttt

SEQ ID NO: 5977 - RNA, 14 nt, synthetic construct
  source 1..14: mol_type = other RNA
gaacaccatgttta

SEQ ID NO: 5978 - RNA, 15 nt, synthetic construct
  source 1..15: mol_type = other RNA
gaacaccatgtttag

SEQ ID NO: 5979 - RNA, 16 nt, synthetic construct
  source 1..16: mol_type = other RNA
gaacaccatgtttaga

SEQ ID NO: 5980 - RNA, 17 nt, synthetic construct
  source 1..17: mol_type = other RNA
gaacaccatgtttagaa

SEQ ID NO: 5981 - RNA, 18 nt, synthetic construct
  source 1..18: mol_type = other RNA
gaacaccatgtttagaat

SEQ ID NO: 5982 - RNA, 19 nt, synthetic construct
  source 1..19: mol_type = other RNA
gaacaccatgtttagaatt

SEQ ID NO: 5983 - RNA, 85 nt, synthetic construct
  source 1..85: mol_type = other RNA
ggtggctggaacacttggcaaaggtaacagcagcttcaggttcagaaaagagctgctccttcagtaaacaaatctcacttcctct

SEQ ID NO: 5984 - RNA, 86 nt, synthetic construct
  source 1..86: mol_type = other RNA
cggtggctggaacacttggcaaaggtaacagcagcttcaggttcagaaaagagctgctccttcagtaaacaaatctcacttcctct

SEQ ID NO: 5985 - RNA, 87 nt, synthetic construct
  source 1..87: mol_type = other RNA
ccggtggctggaacacttggcaaaggtaacagcagcttcaggttcagaaaagagctgctccttcagtaaacaaatctcacttcctct

SEQ ID NO: 5986 - RNA, 88 nt, synthetic construct
  source 1..88: mol_type = other RNA
gccggtggctggaacacttggcaaaggtaacagcagcttcaggttcagaaaagagctgctccttcagtaaacaaatctcacttcctct

SEQ ID NO: 5987 - RNA, 89 nt, synthetic construct
  source 1..89: mol_type = other RNA
ggccggtggctggaacacttggcaaaggtaacagcagcttcaggttcagaaaagagctgctccttcagtaaacaaatctcacttcctct

SEQ ID NO: 5988 - RNA, 90 nt, synthetic construct
  source 1..90: mol_type = other RNA
gggccggtggctggaacacttggcaaaggtaacagcagcttcaggttcagaaaagagctgctccttcagtaaacaaatctcacttcctct

SEQ ID NO: 5989 - RNA, 91 nt, synthetic construct
  source 1..91: mol_type = other RNA
tgggccggtggctggaacacttggcaaaggtaacagcagcttcaggttcagaaaagagctgctccttcagtaaacaaatctcacttcctct

SEQ ID NO: 5990 - RNA, 92 nt, synthetic construct
  source 1..92: mol_type = other RNA
ctgggccggtggctggaacacttggcaaaggtaacagcagcttcaggttcagaaaagagctgctccttcagtaaacaaatctcacttcctct

SEQ ID NO: 5991 - RNA, 93 nt, synthetic construct
  source 1..93: mol_type = other RNA
cctgggccggtggctggaacacttggcaaaggtaacagcagcttcaggttcagaaaagagctgctccttcagtaaacaaatctcacttcctct

SEQ ID NO: 5992 - RNA, 94 nt, synthetic construct
  source 1..94: mol_type = other RNA
ccctgggccggtggctggaacacttggcaaaggtaacagcagcttcaggttcagaaaagagctgctccttcagtaaacaaatctcacttcctct

SEQ ID NO: 5993 - RNA, 95 nt, synthetic construct
  source 1..95: mol_type = other RNA
gccctgggccggtggctggaacacttggcaaaggtaacagcagcttcaggttcagaaaagagctgctccttcagtaaacaaatctcacttcctct

SEQ ID NO: 5994 - RNA, 96 nt, synthetic construct
  source 1..96: mol_type = other RNA
tgccctgggccggtggctggaacacttggcaaaggtaacagcagcttcaggttcagaaaagagctgctccttcagtaaacaaatctcacttcctct

SEQ ID NO: 5995 - RNA, 97 nt, synthetic construct
  source 1..97: mol_type = other RNA
ttgccctgggccggtggctggaacacttggcaaaggtaacagcagcttcaggttcagaaaagagctgctccttcagtaaacaaatctcacttcctct

SEQ ID NO: 5996 - RNA, 98 nt, synthetic construct
  source 1..98: mol_type = other RNA
attgccctgggccggtggctggaacacttggcaaaggtaacagcagcttcaggttcagaaaagagctgctccttcagtaaacaaatctcacttcctct

SEQ ID NO: 5997 - RNA, 99 nt, synthetic construct
  source 1..99: mol_type = other RNA
cattgccctgggccggtggctggaacacttggcaaaggtaacagcagcttcaggttcagaaaagagctgctccttcagtaaacaaatctcacttcctct

SEQ ID NO: 5998 - RNA, 100 nt, synthetic construct
  source 1..100: mol_type = other RNA
tcattgccctgggccggtggctggaacacttggcaaaggtaacagcagcttcaggttcagaaaagagctgctccttcagtaaacaaatctcacttcctct

SEQ ID NO: 5999 - RNA, 20 nt, synthetic construct
  source 1..20: mol_type = other RNA
cggtggctggaacacttggc

SEQ ID NO: 6000 - RNA, 20 nt, synthetic construct
  source 1..20: mol_type = other RNA
aagagctgctccttcagtaa

SEQ ID NO: 6001 - RNA, 20 nt, synthetic construct
  source 1..20: mol_type = other RNA
gttcagaaaagagctgctcc

SEQ ID NO: 6002 - RNA, 20 nt, synthetic construct
  source 1..20: mol_type = other RNA
tggcaaaggtaacagcagct

SEQ ID NO: 6003 - RNA, 16 nt, synthetic construct
  source 1..16: mol_type = other RNA
tggtgttcagaggaag

SEQ ID NO: 6004 - RNA, 17 nt, synthetic construct
  source 1..17: mol_type = other RNA
atggtgttcagaggaag

SEQ ID NO: 6005 - RNA, 18 nt, synthetic construct
  source 1..18: mol_type = other RNA
catggtgttcagaggaag

SEQ ID NO: 6006 - RNA, 19 nt, synthetic construct
  source 1..19: mol_type = other RNA
acatggtgttcagaggaag

SEQ ID NO: 6007 - RNA, 20 nt, synthetic construct
  source 1..20: mol_type = other RNA
aacatggtgttcagaggaag

SEQ ID NO: 6008 - RNA, 21 nt, synthetic construct
  source 1..21: mol_type = other RNA
aaacatggtgttcagaggaag

SEQ ID NO: 6009 - RNA, 22 nt, synthetic construct
  source 1..22: mol_type = other RNA
taaacatggtgttcagaggaag

SEQ ID NO: 6010-6015 - skipped (6 entries)

SEQ ID NO: 6016 - RNA, 10 nt, synthetic construct
  source 1..10: mol_type = other RNA
cctctgaaca

SEQ ID NO: 6017 - RNA, 11 nt, synthetic construct
  source 1..11: mol_type = other RNA
cctctgaacac

SEQ ID NO: 6018 - RNA, 12 nt, synthetic construct
  source 1..12: mol_type = other RNA
cctctgaacacc

SEQ ID NO: 6019 - RNA, 13 nt, synthetic construct
  source 1..13: mol_type = other RNA
cctctgaacacca

SEQ ID NO: 6020 - RNA, 14 nt, synthetic construct
  source 1..14: mol_type = other RNA
cctctgaacaccat

SEQ ID NO: 6021 - RNA, 15 nt, synthetic construct
  source 1..15: mol_type = other RNA
cctctgaacaccatg

SEQ ID NO: 6022 - RNA, 16 nt, synthetic construct
  source 1..16: mol_type = other RNA
cctctgaacaccatgt

SEQ ID NO: 6023 - RNA, 17 nt, synthetic construct
  source 1..17: mol_type = other RNA
cctctgaacaccatgtt

SEQ ID NO: 6024 - RNA, 18 nt, synthetic construct
  source 1..18: mol_type = other RNA
cctctgaacaccatgttt

SEQ ID NO: 6025 - RNA, 19 nt, synthetic construct
  source 1..19: mol_type = other RNA
cctctgaacaccatgttta

SEQ ID NO: 6026 - RNA, 80 nt, synthetic construct
  source 1..80: mol_type = other RNA
ggtggctggaacacttggcaaaggtaacagcagcttcaggttcagaaaagagctgctccttcagtaaacaaatctcactt

SEQ ID NO: 6027 - RNA, 81 nt, synthetic construct
  source 1..81: mol_type = other RNA
cggtggctggaacacttggcaaaggtaacagcagcttcaggttcagaaaagagctgctccttcagtaaacaaatctcactt

SEQ ID NO: 6028 - RNA, 82 nt, synthetic construct
  source 1..82: mol_type = other RNA
ccggtggctggaacacttggcaaaggtaacagcagcttcaggttcagaaaagagctgctccttcagtaaacaaatctcactt

SEQ ID NO: 6029 - RNA, 83 nt, synthetic construct
  source 1..83: mol_type = other RNA
gccggtggctggaacacttggcaaaggtaacagcagcttcaggttcagaaaagagctgctccttcagtaaacaaatctcactt

SEQ ID NO: 6030 - RNA, 84 nt, synthetic construct
  source 1..84: mol_type = other RNA
ggccggtggctggaacacttggcaaaggtaacagcagcttcaggttcagaaaagagctgctccttcagtaaacaaatctcactt

SEQ ID NO: 6031 - RNA, 85 nt, synthetic construct
  source 1..85: mol_type = other RNA
gggccggtggctggaacacttggcaaaggtaacagcagcttcaggttcagaaaagagctgctccttcagtaaacaaatctcactt

SEQ ID NO: 6032 - RNA, 86 nt, synthetic construct
  source 1..86: mol_type = other RNA
tgggccggtggctggaacacttggcaaaggtaacagcagcttcaggttcagaaaagagctgctccttcagtaaacaaatctcactt

SEQ ID NO: 6033 - RNA, 87 nt, synthetic construct
  source 1..87: mol_type = other RNA
ctgggccggtggctggaacacttggcaaaggtaacagcagcttcaggttcagaaaagagctgctccttcagtaaacaaatctcactt

SEQ ID NO: 6034 - RNA, 88 nt, synthetic construct
  source 1..88: mol_type = other RNA
cctgggccggtggctggaacacttggcaaaggtaacagcagcttcaggttcagaaaagagctgctccttcagtaaacaaatctcactt

SEQ ID NO: 6035 - RNA, 89 nt, synthetic construct
  source 1..89: mol_type = other RNA
ccctgggccggtggctggaacacttggcaaaggtaacagcagcttcaggttcagaaaagagctgctccttcagtaaacaaatctcactt

SEQ ID NO: 6036 - RNA, 90 nt, synthetic construct
  source 1..90: mol_type = other RNA
gccctgggccggtggctggaacacttggcaaaggtaacagcagcttcaggttcagaaaagagctgctccttcagtaaacaaatctcactt

SEQ ID NO: 6037 - RNA, 91 nt, synthetic construct
  source 1..91: mol_type = other RNA
tgccctgggccggtggctggaacacttggcaaaggtaacagcagcttcaggttcagaaaagagctgctccttcagtaaacaaatctcactt

SEQ ID NO: 6038 - RNA, 92 nt, synthetic construct
  source 1..92: mol_type = other RNA
ttgccctgggccggtggctggaacacttggcaaaggtaacagcagcttcaggttcagaaaagagctgctccttcagtaaacaaatctcactt

SEQ ID NO: 6039 - RNA, 93 nt, synthetic construct
  source 1..93: mol_type = other RNA
attgccctgggccggtggctggaacacttggcaaaggtaacagcagcttcaggttcagaaaagagctgctccttcagtaaacaaatctcactt

SEQ ID NO: 6040 - RNA, 94 nt, synthetic construct
  source 1..94: mol_type = other RNA
cattgccctgggccggtggctggaacacttggcaaaggtaacagcagcttcaggttcagaaaagagctgctccttcagtaaacaaatctcactt

SEQ ID NO: 6041 - RNA, 95 nt, synthetic construct
  source 1..95: mol_type = other RNA
tcattgccctgggccggtggctggaacacttggcaaaggtaacagcagcttcaggttcagaaaagagctgctccttcagtaaacaaatctcactt

SEQ ID NO: 6042 - RNA, 96 nt, synthetic construct
  source 1..96: mol_type = other RNA
ttcattgccctgggccggtggctggaacacttggcaaaggtaacagcagcttcaggttcagaaaagagctgctccttcagtaaacaaatctcactt

SEQ ID NO: 6043 - RNA, 97 nt, synthetic construct
  source 1..97: mol_type = other RNA
gttcattgccctgggccggtggctggaacacttggcaaaggtaacagcagcttcaggttcagaaaagagctgctccttcagtaaacaaatctcactt

SEQ ID NO: 6044 - RNA, 98 nt, synthetic construct
  source 1..98: mol_type = other RNA
tgttcattgccctgggccggtggctggaacacttggcaaaggtaacagcagcttcaggttcagaaaagagctgctccttcagtaaacaaatctcactt

SEQ ID NO: 6045 - RNA, 99 nt, synthetic construct
  source 1..99: mol_type = other RNA
gtgttcattgccctgggccggtggctggaacacttggcaaaggtaacagcagcttcaggttcagaaaagagctgctccttcagtaaacaaatctcactt

SEQ ID NO: 6046 - RNA, 100 nt, synthetic construct
  source 1..100: mol_type = other RNA
tgtgttcattgccctgggccggtggctggaacacttggcaaaggtaacagcagcttcaggttcagaaaagagctgctccttcagtaaacaaatctcactt

SEQ ID NO: 6047 - RNA, 16 nt, synthetic construct
  source 1..16: mol_type = other RNA
gtgttcagaggaagtg

SEQ ID NO: 6048 - RNA, 17 nt, synthetic construct
  source 1..17: mol_type = other RNA
ggtgttcagaggaagtg

SEQ ID NO: 6049 - RNA, 18 nt, synthetic construct
  source 1..18: mol_type = other RNA
tggtgttcagaggaagtg

SEQ ID NO: 6050 - RNA, 19 nt, synthetic construct
  source 1..19: mol_type = other RNA
atggtgttcagaggaagtg

SEQ ID NO: 6051 - RNA, 20 nt, synthetic construct
  source 1..20: mol_type = other RNA
catggtgttcagaggaagtg

SEQ ID NO: 6052 - RNA, 21 nt, synthetic construct
  source 1..21: mol_type = other RNA
acatggtgttcagaggaagtg

SEQ ID NO: 6053 - RNA, 22 nt, synthetic construct
  source 1..22: mol_type = other RNA
aacatggtgttcagaggaagtg

SEQ ID NO: 6054-6059 - skipped (6 entries)

SEQ ID NO: 6060 - RNA, 10 nt, synthetic construct
  source 1..10: mol_type = other RNA
ttcctctgaa

SEQ ID NO: 6061 - RNA, 11 nt, synthetic construct
  source 1..11: mol_type = other RNA
ttcctctgaac

SEQ ID NO: 6062 - RNA, 12 nt, synthetic construct
  source 1..12: mol_type = other RNA
ttcctctgaaca

SEQ ID NO: 6063 - RNA, 13 nt, synthetic construct
  source 1..13: mol_type = other RNA
ttcctctgaacac

SEQ ID NO: 6064 - RNA, 14 nt, synthetic construct
  source 1..14: mol_type = other RNA
ttcctctgaacacc

SEQ ID NO: 6065 - RNA, 15 nt, synthetic construct
  source 1..15: mol_type = other RNA
ttcctctgaacacca

SEQ ID NO: 6066 - RNA, 16 nt, synthetic construct
  source 1..16: mol_type = other RNA
ttcctctgaacaccat

SEQ ID NO: 6067 - RNA, 17 nt, synthetic construct
  source 1..17: mol_type = other RNA
ttcctctgaacaccatg

SEQ ID NO: 6068 - RNA, 18 nt, synthetic construct
  source 1..18: mol_type = other RNA
ttcctctgaacaccatgt

SEQ ID NO: 6069 - RNA, 19 nt, synthetic construct
  source 1..19: mol_type = other RNA
ttcctctgaacaccatgtt

SEQ ID NO: 6070 - RNA, 78 nt, synthetic construct
  source 1..78: mol_type = other RNA
ggtggctggaacacttggcaaaggtaacagcagcttcaggttcagaaaagagctgctccttcagtaaacaaatctcac

SEQ ID NO: 6071 - RNA, 79 nt, synthetic construct
  source 1..79: mol_type = other RNA
cggtggctggaacacttggcaaaggtaacagcagcttcaggttcagaaaagagctgctccttcagtaaacaaatctcac

SEQ ID NO: 6072 - RNA, 80 nt, synthetic construct
  source 1..80: mol_type = other RNA
ccggtggctggaacacttggcaaaggtaacagcagcttcaggttcagaaaagagctgctccttcagtaaacaaatctcac

SEQ ID NO: 6073 - RNA, 81 nt, synthetic construct
  source 1..81: mol_type = other RNA
gccggtggctggaacacttggcaaaggtaacagcagcttcaggttcagaaaagagctgctccttcagtaaacaaatctcac

SEQ ID NO: 6074 - RNA, 82 nt, synthetic construct
  source 1..82: mol_type = other RNA
ggccggtggctggaacacttggcaaaggtaacagcagcttcaggttcagaaaagagctgctccttcagtaaacaaatctcac

SEQ ID NO: 6075 - RNA, 83 nt, synthetic construct
  source 1..83: mol_type = other RNA
gggccggtggctggaacacttggcaaaggtaacagcagcttcaggttcagaaaagagctgctccttcagtaaacaaatctcac

SEQ ID NO: 6076 - RNA, 84 nt, synthetic construct
  source 1..84: mol_type = other RNA
tgggccggtggctggaacacttggcaaaggtaacagcagcttcaggttcagaaaagagctgctccttcagtaaacaaatctcac

SEQ ID NO: 6077 - RNA, 85 nt, synthetic construct
  source 1..85: mol_type = other RNA
ctgggccggtggctggaacacttggcaaaggtaacagcagcttcaggttcagaaaagagctgctccttcagtaaacaaatctcac

SEQ ID NO: 6078 - RNA, 86 nt, synthetic construct
  source 1..86: mol_type = other RNA
cctgggccggtggctggaacacttggcaaaggtaacagcagcttcaggttcagaaaagagctgctccttcagtaaacaaatctcac

SEQ ID NO: 6079 - RNA, 87 nt, synthetic construct
  source 1..87: mol_type = other RNA
ccctgggccggtggctggaacacttggcaaaggtaacagcagcttcaggttcagaaaagagctgctccttcagtaaacaaatctcac

SEQ ID NO: 6080 - RNA, 88 nt, synthetic construct
  source 1..88: mol_type = other RNA
gccctgggccggtggctggaacacttggcaaaggtaacagcagcttcaggttcagaaaagagctgctccttcagtaaacaaatctcac

SEQ ID NO: 6081 - RNA, 89 nt, synthetic construct
  source 1..89: mol_type = other RNA
tgccctgggccggtggctggaacacttggcaaaggtaacagcagcttcaggttcagaaaagagctgctccttcagtaaacaaatctcac

SEQ ID NO: 6082 - RNA, 90 nt, synthetic construct
  source 1..90: mol_type = other RNA
ttgccctgggccggtggctggaacacttggcaaaggtaacagcagcttcaggttcagaaaagagctgctccttcagtaaacaaatctcac

SEQ ID NO: 6083 - RNA, 91 nt, synthetic construct
  source 1..91: mol_type = other RNA
attgccctgggccggtggctggaacacttggcaaaggtaacagcagcttcaggttcagaaaagagctgctccttcagtaaacaaatctcac

SEQ ID NO: 6084 - RNA, 92 nt, synthetic construct
  source 1..92: mol_type = other RNA
cattgccctgggccggtggctggaacacttggcaaaggtaacagcagcttcaggttcagaaaagagctgctccttcagtaaacaaatctcac

SEQ ID NO: 6085 - RNA, 93 nt, synthetic construct
  source 1..93: mol_type = other RNA
tcattgccctgggccggtggctggaacacttggcaaaggtaacagcagcttcaggttcagaaaagagctgctccttcagtaaacaaatctcac

SEQ ID NO: 6086 - RNA, 94 nt, synthetic construct
  source 1..94: mol_type = other RNA
ttcattgccctgggccggtggctggaacacttggcaaaggtaacagcagcttcaggttcagaaaagagctgctccttcagtaaacaaatctcac

SEQ ID NO: 6087 - RNA, 95 nt, synthetic construct
  source 1..95: mol_type = other RNA
gttcattgccctgggccggtggctggaacacttggcaaaggtaacagcagcttcaggttcagaaaagagctgctccttcagtaaacaaatctcac

SEQ ID NO: 6088 - RNA, 96 nt, synthetic construct
  source 1..96: mol_type = other RNA
tgttcattgccctgggccggtggctggaacacttggcaaaggtaacagcagcttcaggttcagaaaagagctgctccttcagtaaacaaatctcac

SEQ ID NO: 6089 - RNA, 97 nt, synthetic construct
  source 1..97: mol_type = other RNA
gtgttcattgccctgggccggtggctggaacacttggcaaaggtaacagcagcttcaggttcagaaaagagctgctccttcagtaaacaaatctcac

SEQ ID NO: 6090 - RNA, 98 nt, synthetic construct
  source 1..98: mol_type = other RNA
tgtgttcattgccctgggccggtggctggaacacttggcaaaggtaacagcagcttcaggttcagaaaagagctgctccttcagtaaacaaatctcac

SEQ ID NO: 6091 - RNA, 99 nt, synthetic construct
  source 1..99: mol_type = other RNA
ttgtgttcattgccctgggccggtggctggaacacttggcaaaggtaacagcagcttcaggttcagaaaagagctgctccttcagtaaacaaatctcac

SEQ ID NO: 6092 - RNA, 100 nt, synthetic construct
  source 1..100: mol_type = other RNA
tttgtgttcattgccctgggccggtggctggaacacttggcaaaggtaacagcagcttcaggttcagaaaagagctgctccttcagtaaacaaatctcac

SEQ ID NO: 6093 - RNA, 16 nt, synthetic construct
  source 1..16: mol_type = other RNA
agtgagatttgtttac

SEQ ID NO: 6094 - RNA, 17 nt, synthetic construct
  source 1..17: mol_type = other RNA
aagtgagatttgtttac

SEQ ID NO: 6095 - RNA, 18 nt, synthetic construct
  source 1..18: mol_type = other RNA
gaagtgagatttgtttac

SEQ ID NO: 6096 - RNA, 19 nt, synthetic construct
  source 1..19: mol_type = other RNA
ggaagtgagatttgtttac

SEQ ID NO: 6097 - RNA, 20 nt, synthetic construct
  source 1..20: mol_type = other RNA
aggaagtgagatttgtttac

SEQ ID NO: 6098 - RNA, 21 nt, synthetic construct
  source 1..21: mol_type = other RNA
gaggaagtgagatttgtttac

SEQ ID NO: 6099 - RNA, 22 nt, synthetic construct
  source 1..22: mol_type = other RNA
agaggaagtgagatttgtttac

SEQ ID NO: 6100-6104 - skipped (5 entries)

SEQ ID NO: 6105 - RNA, 10 nt, synthetic construct
  source 1..10: mol_type = other RNA
aacaaatctc

SEQ ID NO: 6106 - RNA, 11 nt, synthetic construct
  source 1..11: mol_type = other RNA
aacaaatctca

SEQ ID NO: 6107 - RNA, 12 nt, synthetic construct
  source 1..12: mol_type = other RNA
aacaaatctcac

SEQ ID NO: 6108 - RNA, 13 nt, synthetic construct
  source 1..13: mol_type = other RNA
aacaaatctcact

SEQ ID NO: 6109 - RNA, 14 nt, synthetic construct
  source 1..14: mol_type = other RNA
aacaaatctcactt

SEQ ID NO: 6110 - RNA, 15 nt, synthetic construct
  source 1..15: mol_type = other RNA
aacaaatctcacttc

SEQ ID NO: 6111 - RNA, 16 nt, synthetic construct
  source 1..16: mol_type = other RNA
aacaaatctcacttcc

SEQ ID NO: 6112 - RNA, 17 nt, synthetic construct
  source 1..17: mol_type = other RNA
aacaaatctcacttcct

SEQ ID NO: 6113 - RNA, 18 nt, synthetic construct
  source 1..18: mol_type = other RNA
aacaaatctcacttcctc

SEQ ID NO: 6114 - RNA, 19 nt, synthetic construct
  source 1..19: mol_type = other RNA
aacaaatctcacttcctct

SEQ ID NO: 6115 - RNA, 66 nt, synthetic construct
  source 1..66: mol_type = other RNA
ggtggctggaacacttggcaaaggtaacagcagcttcaggttcagaaaagagctgctccttcagta

SEQ ID NO: 6116 - RNA, 67 nt, synthetic construct
  source 1..67: mol_type = other RNA
cggtggctggaacacttggcaaaggtaacagcagcttcaggttcagaaaagagctgctccttcagta

SEQ ID NO: 6117 - RNA, 68 nt, synthetic construct
  source 1..68: mol_type = other RNA
ccggtggctggaacacttggcaaaggtaacagcagcttcaggttcagaaaagagctgctccttcagta

SEQ ID NO: 6118 - RNA, 69 nt, synthetic construct
  source 1..69: mol_type = other RNA
gccggtggctggaacacttggcaaaggtaacagcagcttcaggttcagaaaagagctgctccttcagta

SEQ ID NO: 6119 - RNA, 70 nt, synthetic construct
  source 1..70: mol_type = other RNA
ggccggtggctggaacacttggcaaaggtaacagcagcttcaggttcagaaaagagctgctccttcagta

SEQ ID NO: 6120 - RNA, 71 nt, synthetic construct
  source 1..71: mol_type = other RNA
gggccggtggctggaacacttggcaaaggtaacagcagcttcaggttcagaaaagagctgctccttcagta

SEQ ID NO: 6121 - RNA, 72 nt, synthetic construct
  source 1..72: mol_type = other RNA
tgggccggtggctggaacacttggcaaaggtaacagcagcttcaggttcagaaaagagctgctccttcagta

SEQ ID NO: 6122 - RNA, 73 nt, synthetic construct
  source 1..73: mol_type = other RNA
ctgggccggtggctggaacacttggcaaaggtaacagcagcttcaggttcagaaaagagctgctccttcagta

SEQ ID NO: 6123 - RNA, 74 nt, synthetic construct
  source 1..74: mol_type = other RNA
cctgggccggtggctggaacacttggcaaaggtaacagcagcttcaggttcagaaaagagctgctccttcagta

SEQ ID NO: 6124 - RNA, 75 nt, synthetic construct
  source 1..75: mol_type = other RNA
ccctgggccggtggctggaacacttggcaaaggtaacagcagcttcaggttcagaaaagagctgctccttcagta

SEQ ID NO: 6125 - RNA, 76 nt, synthetic construct
  source 1..76: mol_type = other RNA
gccctgggccggtggctggaacacttggcaaaggtaacagcagcttcaggttcagaaaagagctgctccttcagta

SEQ ID NO: 6126 - RNA, 77 nt, synthetic construct
  source 1..77: mol_type = other RNA
tgccctgggccggtggctggaacacttggcaaaggtaacagcagcttcaggttcagaaaagagctgctccttcagta

SEQ ID NO: 6127 - RNA, 78 nt, synthetic construct
  source 1..78: mol_type = other RNA
ttgccctgggccggtggctggaacacttggcaaaggtaacagcagcttcaggttcagaaaagagctgctccttcagta

SEQ ID NO: 6128 - RNA, 79 nt, synthetic construct
  source 1..79: mol_type = other RNA
attgccctgggccggtggctggaacacttggcaaaggtaacagcagcttcaggttcagaaaagagctgctccttcagta

SEQ ID NO: 6129 - RNA, 80 nt, synthetic construct
  source 1..80: mol_type = other RNA
cattgccctgggccggtggctggaacacttggcaaaggtaacagcagcttcaggttcagaaaagagctgctccttcagta

SEQ ID NO: 6130 - RNA, 81 nt, synthetic construct
  source 1..81: mol_type = other RNA
tcattgccctgggccggtggctggaacacttggcaaaggtaacagcagcttcaggttcagaaaagagctgctccttcagta

SEQ ID NO: 6131 - RNA, 82 nt, synthetic construct
  source 1..82: mol_type = other RNA
ttcattgccctgggccggtggctggaacacttggcaaaggtaacagcagcttcaggttcagaaaagagctgctccttcagta

SEQ ID NO: 6132 - RNA, 83 nt, synthetic construct
  source 1..83: mol_type = other RNA
gttcattgccctgggccggtggctggaacacttggcaaaggtaacagcagcttcaggttcagaaaagagctgctccttcagta

SEQ ID NO: 6133 - RNA, 84 nt, synthetic construct
  source 1..84: mol_type = other RNA
tgttcattgccctgggccggtggctggaacacttggcaaaggtaacagcagcttcaggttcagaaaagagctgctccttcagta

SEQ ID NO: 6134 - RNA, 85 nt, synthetic construct
  source 1..85: mol_type = other RNA
gtgttcattgccctgggccggtggctggaacacttggcaaaggtaacagcagcttcaggttcagaaaagagctgctccttcagta

SEQ ID NO: 6135 - RNA, 86 nt, synthetic construct
  source 1..86: mol_type = other RNA
tgtgttcattgccctgggccggtggctggaacacttggcaaaggtaacagcagcttcaggttcagaaaagagctgctccttcagta

SEQ ID NO: 6136 - RNA, 87 nt, synthetic construct
  source 1..87: mol_type = other RNA
ttgtgttcattgccctgggccggtggctggaacacttggcaaaggtaacagcagcttcaggttcagaaaagagctgctccttcagta

SEQ ID NO: 6137 - RNA, 88 nt, synthetic construct
  source 1..88: mol_type = other RNA
tttgtgttcattgccctgggccggtggctggaacacttggcaaaggtaacagcagcttcaggttcagaaaagagctgctccttcagta

SEQ ID NO: 6138 - RNA, 89 nt, synthetic construct
  source 1..89: mol_type = other RNA
ctttgtgttcattgccctgggccggtggctggaacacttggcaaaggtaacagcagcttcaggttcagaaaagagctgctccttcagta

SEQ ID NO: 6139 - RNA, 90 nt, synthetic construct
  source 1..90: mol_type = other RNA
tctttgtgttcattgccctgggccggtggctggaacacttggcaaaggtaacagcagcttcaggttcagaaaagagctgctccttcagta

SEQ ID NO: 6140 - RNA, 91 nt, synthetic construct
  source 1..91: mol_type = other RNA
ctctttgtgttcattgccctgggccggtggctggaacacttggcaaaggtaacagcagcttcaggttcagaaaagagctgctccttcagta

SEQ ID NO: 6141 - RNA, 92 nt, synthetic construct
  source 1..92: mol_type = other RNA
gctctttgtgttcattgccctgggccggtggctggaacacttggcaaaggtaacagcagcttcaggttcagaaaagagctgctccttcagta

SEQ ID NO: 6142 - RNA, 93 nt, synthetic construct
  source 1..93: mol_type = other RNA
tgctctttgtgttcattgccctgggccggtggctggaacacttggcaaaggtaacagcagcttcaggttcagaaaagagctgctccttcagta

SEQ ID NO: 6143 - RNA, 94 nt, synthetic construct
  source 1..94: mol_type = other RNA
atgctctttgtgttcattgccctgggccggtggctggaacacttggcaaaggtaacagcagcttcaggttcagaaaagagctgctccttcagta

SEQ ID NO: 6144 - RNA, 95 nt, synthetic construct
  source 1..95: mol_type = other RNA
catgctctttgtgttcattgccctgggccggtggctggaacacttggcaaaggtaacagcagcttcaggttcagaaaagagctgctccttcagta

SEQ ID NO: 6145 - RNA, 96 nt, synthetic construct
  source 1..96: mol_type = other RNA
ccatgctctttgtgttcattgccctgggccggtggctggaacacttggcaaaggtaacagcagcttcaggttcagaaaagagctgctccttcagta

SEQ ID NO: 6146 - RNA, 97 nt, synthetic construct
  source 1..97: mol_type = other RNA
cccatgctctttgtgttcattgccctgggccggtggctggaacacttggcaaaggtaacagcagcttcaggttcagaaaagagctgctccttcagta

SEQ ID NO: 6147 - RNA, 98 nt, synthetic construct
  source 1..98: mol_type = other RNA
ccccatgctctttgtgttcattgccctgggccggtggctggaacacttggcaaaggtaacagcagcttcaggttcagaaaagagctgctccttcagta

SEQ ID NO: 6148 - RNA, 99 nt, synthetic construct
  source 1..99: mol_type = other RNA
cccccatgctctttgtgttcattgccctgggccggtggctggaacacttggcaaaggtaacagcagcttcaggttcagaaaagagctgctccttcagta

SEQ ID NO: 6149 - RNA, 100 nt, synthetic construct
  source 1..100: mol_type = other RNA
ccccccatgctctttgtgttcattgccctgggccggtggctggaacacttggcaaaggtaacagcagcttcaggttcagaaaagagctgctccttcagta

SEQ ID NO: 6150 - RNA, 16 nt, synthetic construct
  source 1..16: mol_type = other RNA
agatttgtttactgaa

SEQ ID NO: 6151 - RNA, 17 nt, synthetic construct
  source 1..17: mol_type = other RNA
gagatttgtttactgaa

SEQ ID NO: 6152 - RNA, 18 nt, synthetic construct
  source 1..18: mol_type = other RNA
tgagatttgtttactgaa

SEQ ID NO: 6153 - RNA, 19 nt, synthetic construct
  source 1..19: mol_type = other RNA
gtgagatttgtttactgaa

SEQ ID NO: 6154 - RNA, 20 nt, synthetic construct
  source 1..20: mol_type = other RNA
agtgagatttgtttactgaa

SEQ ID NO: 6155 - RNA, 21 nt, synthetic construct
  source 1..21: mol_type = other RNA
aagtgagatttgtttactgaa

SEQ ID NO: 6156 - RNA, 22 nt, synthetic construct
  source 1..22: mol_type = other RNA
gaagtgagatttgtttactgaa

SEQ ID NO: 6157-6163 - skipped (7 entries)

SEQ ID NO: 6164 - RNA, 10 nt, synthetic construct
  source 1..10: mol_type = other RNA
agtaaacaaa

SEQ ID NO: 6165 - RNA, 11 nt, synthetic construct
  source 1..11: mol_type = other RNA
agtaaacaaat

SEQ ID NO: 6166 - RNA, 12 nt, synthetic construct
  source 1..12: mol_type = other RNA
agtaaacaaatc

SEQ ID NO: 6167 - RNA, 13 nt, synthetic construct
  source 1..13: mol_type = other RNA
agtaaacaaatct

SEQ ID NO: 6168 - RNA, 14 nt, synthetic construct
  source 1..14: mol_type = other RNA
agtaaacaaatctc

SEQ ID NO: 6169 - RNA, 15 nt, synthetic construct
  source 1..15: mol_type = other RNA
agtaaacaaatctca

SEQ ID NO: 6170 - RNA, 16 nt, synthetic construct
  source 1..16: mol_type = other RNA
agtaaacaaatctcac

SEQ ID NO: 6171 - RNA, 17 nt, synthetic construct
  source 1..17: mol_type = other RNA
agtaaacaaatctcact

SEQ ID NO: 6172 - RNA, 18 nt, synthetic construct
  source 1..18: mol_type = other RNA
agtaaacaaatctcactt

SEQ ID NO: 6173 - RNA, 19 nt, synthetic construct
  source 1..19: mol_type = other RNA
agtaaacaaatctcacttc

SEQ ID NO: 6174 - RNA, 62 nt, synthetic construct
  source 1..62: mol_type = other RNA
ggtggctggaacacttggcaaaggtaacagcagcttcaggttcagaaaagagctgctccttc

SEQ ID NO: 6175 - RNA, 63 nt, synthetic construct
  source 1..63: mol_type = other RNA
cggtggctggaacacttggcaaaggtaacagcagcttcaggttcagaaaagagctgctccttc

SEQ ID NO: 6176 - RNA, 64 nt, synthetic construct
  source 1..64: mol_type = other RNA
ccggtggctggaacacttggcaaaggtaacagcagcttcaggttcagaaaagagctgctccttc

SEQ ID NO: 6177 - RNA, 65 nt, synthetic construct
  source 1..65: mol_type = other RNA
gccggtggctggaacacttggcaaaggtaacagcagcttcaggttcagaaaagagctgctccttc

SEQ ID NO: 6178 - RNA, 66 nt, synthetic construct
  source 1..66: mol_type = other RNA
ggccggtggctggaacacttggcaaaggtaacagcagcttcaggttcagaaaagagctgctccttc

SEQ ID NO: 6179 - RNA, 67 nt, synthetic construct
  source 1..67: mol_type = other RNA
gggccggtggctggaacacttggcaaaggtaacagcagcttcaggttcagaaaagagctgctccttc

SEQ ID NO: 6180 - RNA, 68 nt, synthetic construct
  source 1..68: mol_type = other RNA
tgggccggtggctggaacacttggcaaaggtaacagcagcttcaggttcagaaaagagctgctccttc

SEQ ID NO: 6181 - RNA, 69 nt, synthetic construct
  source 1..69: mol_type = other RNA
ctgggccggtggctggaacacttggcaaaggtaacagcagcttcaggttcagaaaagagctgctccttc

SEQ ID NO: 6182 - RNA, 70 nt, synthetic construct
  source 1..70: mol_type = other RNA
cctgggccggtggctggaacacttggcaaaggtaacagcagcttcaggttcagaaaagagctgctccttc

SEQ ID NO: 6183 - RNA, 71 nt, synthetic construct
  source 1..71: mol_type = other RNA
ccctgggccggtggctggaacacttggcaaaggtaacagcagcttcaggttcagaaaagagctgctccttc

SEQ ID NO: 6184 - RNA, 72 nt, synthetic construct
  source 1..72: mol_type = other RNA
gccctgggccggtggctggaacacttggcaaaggtaacagcagcttcaggttcagaaaagagctgctccttc

SEQ ID NO: 6185 - RNA, 73 nt, synthetic construct
  source 1..73: mol_type = other RNA
tgccctgggccggtggctggaacacttggcaaaggtaacagcagcttcaggttcagaaaagagctgctccttc

SEQ ID NO: 6186 - RNA, 74 nt, synthetic construct
  source 1..74: mol_type = other RNA
ttgccctgggccggtggctggaacacttggcaaaggtaacagcagcttcaggttcagaaaagagctgctccttc

SEQ ID NO: 6187 - RNA, 75 nt, synthetic construct
  source 1..75: mol_type = other RNA
attgccctgggccggtggctggaacacttggcaaaggtaacagcagcttcaggttcagaaaagagctgctccttc

SEQ ID NO: 6188 - RNA, 76 nt, synthetic construct
  source 1..76: mol_type = other RNA
cattgccctgggccggtggctggaacacttggcaaaggtaacagcagcttcaggttcagaaaagagctgctccttc

SEQ ID NO: 6189 - RNA, 77 nt, synthetic construct
  source 1..77: mol_type = other RNA
tcattgccctgggccggtggctggaacacttggcaaaggtaacagcagcttcaggttcagaaaagagctgctccttc

SEQ ID NO: 6190 - RNA, 78 nt, synthetic construct
  source 1..78: mol_type = other RNA
ttcattgccctgggccggtggctggaacacttggcaaaggtaacagcagcttcaggttcagaaaagagctgctccttc

SEQ ID NO: 6191 - RNA, 79 nt, synthetic construct
  source 1..79: mol_type = other RNA
gttcattgccctgggccggtggctggaacacttggcaaaggtaacagcagcttcaggttcagaaaagagctgctccttc

SEQ ID NO: 6192 - RNA, 80 nt, synthetic construct
  source 1..80: mol_type = other RNA
tgttcattgccctgggccggtggctggaacacttggcaaaggtaacagcagcttcaggttcagaaaagagctgctccttc

SEQ ID NO: 6193 - RNA, 81 nt, synthetic construct
  source 1..81: mol_type = other RNA
gtgttcattgccctgggccggtggctggaacacttggcaaaggtaacagcagcttcaggttcagaaaagagctgctccttc

SEQ ID NO: 6194 - RNA, 82 nt, synthetic construct
  source 1..82: mol_type = other RNA
tgtgttcattgccctgggccggtggctggaacacttggcaaaggtaacagcagcttcaggttcagaaaagagctgctccttc

SEQ ID NO: 6195 - RNA, 83 nt, synthetic construct
  source 1..83: mol_type = other RNA
ttgtgttcattgccctgggccggtggctggaacacttggcaaaggtaacagcagcttcaggttcagaaaagagctgctccttc

SEQ ID NO: 6196 - RNA, 84 nt, synthetic construct
  source 1..84: mol_type = other RNA
tttgtgttcattgccctgggccggtggctggaacacttggcaaaggtaacagcagcttcaggttcagaaaagagctgctccttc

SEQ ID NO: 6197 - RNA, 85 nt, synthetic construct
  source 1..85: mol_type = other RNA
ctttgtgttcattgccctgggccggtggctggaacacttggcaaaggtaacagcagcttcaggttcagaaaagagctgctccttc

SEQ ID NO: 6198 - RNA, 86 nt, synthetic construct
  source 1..86: mol_type = other RNA
tctttgtgttcattgccctgggccggtggctggaacacttggcaaaggtaacagcagcttcaggttcagaaaagagctgctccttc

SEQ ID NO: 6199 - RNA, 87 nt, synthetic construct
  source 1..87: mol_type = other RNA
ctctttgtgttcattgccctgggccggtggctggaacacttggcaaaggtaacagcagcttcaggttcagaaaagagctgctccttc

SEQ ID NO: 6200 - RNA, 88 nt, synthetic construct
  source 1..88: mol_type = other RNA
gctctttgtgttcattgccctgggccggtggctggaacacttggcaaaggtaacagcagcttcaggttcagaaaagagctgctccttc

SEQ ID NO: 6201 - RNA, 89 nt, synthetic construct
  source 1..89: mol_type = other RNA
tgctctttgtgttcattgccctgggccggtggctggaacacttggcaaaggtaacagcagcttcaggttcagaaaagagctgctccttc

SEQ ID NO: 6202 - RNA, 90 nt, synthetic construct
  source 1..90: mol_type = other RNA
atgctctttgtgttcattgccctgggccggtggctggaacacttggcaaaggtaacagcagcttcaggttcagaaaagagctgctccttc

SEQ ID NO: 6203 - RNA, 91 nt, synthetic construct
  source 1..91: mol_type = other RNA
catgctctttgtgttcattgccctgggccggtggctggaacacttggcaaaggtaacagcagcttcaggttcagaaaagagctgctccttc

SEQ ID NO: 6204 - RNA, 92 nt, synthetic construct
  source 1..92: mol_type = other RNA
ccatgctctttgtgttcattgccctgggccggtggctggaacacttggcaaaggtaacagcagcttcaggttcagaaaagagctgctccttc

SEQ ID NO: 6205 - RNA, 93 nt, synthetic construct
  source 1..93: mol_type = other RNA
cccatgctctttgtgttcattgccctgggccggtggctggaacacttggcaaaggtaacagcagcttcaggttcagaaaagagctgctccttc

SEQ ID NO: 6206 - RNA, 94 nt, synthetic construct
  source 1..94: mol_type = other RNA
ccccatgctctttgtgttcattgccctgggccggtggctggaacacttggcaaaggtaacagcagcttcaggttcagaaaagagctgctccttc

SEQ ID NO: 6207 - RNA, 95 nt, synthetic construct
  source 1..95: mol_type = other RNA
cccccatgctctttgtgttcattgccctgggccggtggctggaacacttggcaaaggtaacagcagcttcaggttcagaaaagagctgctccttc

SEQ ID NO: 6208 - RNA, 96 nt, synthetic construct
  source 1..96: mol_type = other RNA
ccccccatgctctttgtgttcattgccctgggccggtggctggaacacttggcaaaggtaacagcagcttcaggttcagaaaagagctgctccttc

SEQ ID NO: 6209 - RNA, 97 nt, synthetic construct
  source 1..97: mol_type = other RNA
gccccccatgctctttgtgttcattgccctgggccggtggctggaacacttggcaaaggtaacagcagcttcaggttcagaaaagagctgctccttc

SEQ ID NO: 6210 - RNA, 98 nt, synthetic construct
  source 1..98: mol_type = other RNA
cgccccccatgctctttgtgttcattgccctgggccggtggctggaacacttggcaaaggtaacagcagcttcaggttcagaaaagagctgctccttc

SEQ ID NO: 6211 - RNA, 99 nt, synthetic construct
  source 1..99: mol_type = other RNA
acgccccccatgctctttgtgttcattgccctgggccggtggctggaacacttggcaaaggtaacagcagcttcaggttcagaaaagagctgctccttc

SEQ ID NO: 6212 - RNA, 100 nt, synthetic construct
  source 1..100: mol_type = other RNA
cacgccccccatgctctttgtgttcattgccctgggccggtggctggaacacttggcaaaggtaacagcagcttcaggttcagaaaagagctgctccttc

SEQ ID NO: 6213 - RNA, 16 nt, synthetic construct
  source 1..16: mol_type = other RNA
aggagcagctcttttc

SEQ ID NO: 6214 - RNA, 17 nt, synthetic construct
  source 1..17: mol_type = other RNA
aaggagcagctcttttc

SEQ ID NO: 6215 - RNA, 18 nt, synthetic construct
  source 1..18: mol_type = other RNA
gaaggagcagctcttttc

SEQ ID NO: 6216 - RNA, 19 nt, synthetic construct
  source 1..19: mol_type = other RNA
tgaaggagcagctcttttc

SEQ ID NO: 6217 - RNA, 20 nt, synthetic construct
  source 1..20: mol_type = other RNA
ctgaaggagcagctcttttc

SEQ ID NO: 6218 - RNA, 21 nt, synthetic construct
  source 1..21: mol_type = other RNA
actgaaggagcagctcttttc

SEQ ID NO: 6219 - RNA, 22 nt, synthetic construct
  source 1..22: mol_type = other RNA
tactgaaggagcagctcttttc

SEQ ID NO: 6220-6226 - skipped (7 entries)

SEQ ID NO: 6227 - RNA, 10 nt, synthetic construct
  source 1..10: mol_type = other RNA
aagagctgct

SEQ ID NO: 6228 - RNA, 11 nt, synthetic construct
  source 1..11: mol_type = other RNA
aagagctgctc

SEQ ID NO: 6229 - RNA, 12 nt, synthetic construct
  source 1..12: mol_type = other RNA
aagagctgctcc

SEQ ID NO: 6230 - RNA, 13 nt, synthetic construct
  source 1..13: mol_type = other RNA
aagagctgctcct

SEQ ID NO: 6231 - RNA, 14 nt, synthetic construct
  source 1..14: mol_type = other RNA
aagagctgctcctt

SEQ ID NO: 6232 - RNA, 15 nt, synthetic construct
  source 1..15: mol_type = other RNA
aagagctgctccttc

SEQ ID NO: 6233 - RNA, 16 nt, synthetic construct
  source 1..16: mol_type = other RNA
aagagctgctccttca

SEQ ID NO: 6234 - RNA, 17 nt, synthetic construct
  source 1..17: mol_type = other RNA
aagagctgctccttcag

SEQ ID NO: 6235 - RNA, 18 nt, synthetic construct
  source 1..18: mol_type = other RNA
aagagctgctccttcagt

SEQ ID NO: 6236 - RNA, 19 nt, synthetic construct
  source 1..19: mol_type = other RNA
aagagctgctccttcagta

SEQ ID NO: 6237 - RNA, 47 nt, synthetic construct
  source 1..47: mol_type = other RNA
ggtggctggaacacttggcaaaggtaacagcagcttcaggttcagaa

SEQ ID NO: 6238 - RNA, 48 nt, synthetic construct
  source 1..48: mol_type = other RNA
cggtggctggaacacttggcaaaggtaacagcagcttcaggttcagaa

SEQ ID NO: 6239 - RNA, 49 nt, synthetic construct
  source 1..49: mol_type = other RNA
ccggtggctggaacacttggcaaaggtaacagcagcttcaggttcagaa

SEQ ID NO: 6240 - RNA, 50 nt, synthetic construct
  source 1..50: mol_type = other RNA
gccggtggctggaacacttggcaaaggtaacagcagcttcaggttcagaa

SEQ ID NO: 6241 - RNA, 51 nt, synthetic construct
  source 1..51: mol_type = other RNA
ggccggtggctggaacacttggcaaaggtaacagcagcttcaggttcagaa

SEQ ID NO: 6242 - RNA, 52 nt, synthetic construct
  source 1..52: mol_type = other RNA
gggccggtggctggaacacttggcaaaggtaacagcagcttcaggttcagaa

SEQ ID NO: 6243 - RNA, 53 nt, synthetic construct
  source 1..53: mol_type = other RNA
tgggccggtggctggaacacttggcaaaggtaacagcagcttcaggttcagaa

SEQ ID NO: 6244 - RNA, 54 nt, synthetic construct
  source 1..54: mol_type = other RNA
ctgggccggtggctggaacacttggcaaaggtaacagcagcttcaggttcagaa

SEQ ID NO: 6245 - RNA, 55 nt, synthetic construct
  source 1..55: mol_type = other RNA
cctgggccggtggctggaacacttggcaaaggtaacagcagcttcaggttcagaa

SEQ ID NO: 6246 - RNA, 56 nt, synthetic construct
  source 1..56: mol_type = other RNA
ccctgggccggtggctggaacacttggcaaaggtaacagcagcttcaggttcagaa

SEQ ID NO: 6247 - RNA, 57 nt, synthetic construct
  source 1..57: mol_type = other RNA
gccctgggccggtggctggaacacttggcaaaggtaacagcagcttcaggttcagaa

SEQ ID NO: 6248 - RNA, 58 nt, synthetic construct
  source 1..58: mol_type = other RNA
tgccctgggccggtggctggaacacttggcaaaggtaacagcagcttcaggttcagaa

SEQ ID NO: 6249 - RNA, 59 nt, synthetic construct
  source 1..59: mol_type = other RNA
ttgccctgggccggtggctggaacacttggcaaaggtaacagcagcttcaggttcagaa

SEQ ID NO: 6250 - RNA, 60 nt, synthetic construct
  source 1..60: mol_type = other RNA
attgccctgggccggtggctggaacacttggcaaaggtaacagcagcttcaggttcagaa

SEQ ID NO: 6251 - RNA, 61 nt, synthetic construct
  source 1..61: mol_type = other RNA
cattgccctgggccggtggctggaacacttggcaaaggtaacagcagcttcaggttcagaa

SEQ ID NO: 6252 - RNA, 62 nt, synthetic construct
  source 1..62: mol_type = other RNA
tcattgccctgggccggtggctggaacacttggcaaaggtaacagcagcttcaggttcagaa

SEQ ID NO: 6253 - RNA, 63 nt, synthetic construct
  source 1..63: mol_type = other RNA
ttcattgccctgggccggtggctggaacacttggcaaaggtaacagcagcttcaggttcagaa

SEQ ID NO: 6254 - RNA, 64 nt, synthetic construct
  source 1..64: mol_type = other RNA
gttcattgccctgggccggtggctggaacacttggcaaaggtaacagcagcttcaggttcagaa

SEQ ID NO: 6255 - RNA, 65 nt, synthetic construct
  source 1..65: mol_type = other RNA
tgttcattgccctgggccggtggctggaacacttggcaaaggtaacagcagcttcaggttcagaa

SEQ ID NO: 6256 - RNA, 66 nt, synthetic construct
  source 1..66: mol_type = other RNA
gtgttcattgccctgggccggtggctggaacacttggcaaaggtaacagcagcttcaggttcagaa

SEQ ID NO: 6257 - RNA, 67 nt, synthetic construct
  source 1..67: mol_type = other RNA
tgtgttcattgccctgggccggtggctggaacacttggcaaaggtaacagcagcttcaggttcagaa

SEQ ID NO: 6258 - RNA, 68 nt, synthetic construct
  source 1..68: mol_type = other RNA
ttgtgttcattgccctgggccggtggctggaacacttggcaaaggtaacagcagcttcaggttcagaa

SEQ ID NO: 6259 - RNA, 69 nt, synthetic construct
  source 1..69: mol_type = other RNA
tttgtgttcattgccctgggccggtggctggaacacttggcaaaggtaacagcagcttcaggttcagaa

SEQ ID NO: 6260 - RNA, 70 nt, synthetic construct
  source 1..70: mol_type = other RNA
ctttgtgttcattgccctgggccggtggctggaacacttggcaaaggtaacagcagcttcaggttcagaa

SEQ ID NO: 6261 - RNA, 71 nt, synthetic construct
  source 1..71: mol_type = other RNA
tctttgtgttcattgccctgggccggtggctggaacacttggcaaaggtaacagcagcttcaggttcagaa

SEQ ID NO: 6262 - RNA, 72 nt, synthetic construct
  source 1..72: mol_type = other RNA
ctctttgtgttcattgccctgggccggtggctggaacacttggcaaaggtaacagcagcttcaggttcagaa

SEQ ID NO: 6263 - RNA, 73 nt, synthetic construct
  source 1..73: mol_type = other RNA
gctctttgtgttcattgccctgggccggtggctggaacacttggcaaaggtaacagcagcttcaggttcagaa

SEQ ID NO: 6264 - RNA, 74 nt, synthetic construct
  source 1..74: mol_type = other RNA
tgctctttgtgttcattgccctgggccggtggctggaacacttggcaaaggtaacagcagcttcaggttcagaa

SEQ ID NO: 6265 - RNA, 75 nt, synthetic construct
  source 1..75: mol_type = other RNA
atgctctttgtgttcattgccctgggccggtggctggaacacttggcaaaggtaacagcagcttcaggttcagaa

SEQ ID NO: 6266 - RNA, 76 nt, synthetic construct
  source 1..76: mol_type = other RNA
catgctctttgtgttcattgccctgggccggtggctggaacacttggcaaaggtaacagcagcttcaggttcagaa

SEQ ID NO: 6267 - RNA, 77 nt, synthetic construct
  source 1..77: mol_type = other RNA
ccatgctctttgtgttcattgccctgggccggtggctggaacacttggcaaaggtaacagcagcttcaggttcagaa

SEQ ID NO: 6268 - RNA, 78 nt, synthetic construct
  source 1..78: mol_type = other RNA
cccatgctctttgtgttcattgccctgggccggtggctggaacacttggcaaaggtaacagcagcttcaggttcagaa

SEQ ID NO: 6269 - RNA, 79 nt, synthetic construct
  source 1..79: mol_type = other RNA
ccccatgctctttgtgttcattgccctgggccggtggctggaacacttggcaaaggtaacagcagcttcaggttcagaa

SEQ ID NO: 6270 - RNA, 80 nt, synthetic construct
  source 1..80: mol_type = other RNA
cccccatgctctttgtgttcattgccctgggccggtggctggaacacttggcaaaggtaacagcagcttcaggttcagaa

SEQ ID NO: 6271 - RNA, 81 nt, synthetic construct
  source 1..81: mol_type = other RNA
ccccccatgctctttgtgttcattgccctgggccggtggctggaacacttggcaaaggtaacagcagcttcaggttcagaa

SEQ ID NO: 6272 - RNA, 82 nt, synthetic construct
  source 1..82: mol_type = other RNA
gccccccatgctctttgtgttcattgccctgggccggtggctggaacacttggcaaaggtaacagcagcttcaggttcagaa

SEQ ID NO: 6273 - RNA, 83 nt, synthetic construct
  source 1..83: mol_type = other RNA
cgccccccatgctctttgtgttcattgccctgggccggtggctggaacacttggcaaaggtaacagcagcttcaggttcagaa

SEQ ID NO: 6274 - RNA, 84 nt, synthetic construct
  source 1..84: mol_type = other RNA
acgccccccatgctctttgtgttcattgccctgggccggtggctggaacacttggcaaaggtaacagcagcttcaggttcagaa

SEQ ID NO: 6275 - RNA, 85 nt, synthetic construct
  source 1..85: mol_type = other RNA
cacgccccccatgctctttgtgttcattgccctgggccggtggctggaacacttggcaaaggtaacagcagcttcaggttcagaa

SEQ ID NO: 6276 - RNA, 86 nt, synthetic construct
  source 1..86: mol_type = other RNA
acacgccccccatgctctttgtgttcattgccctgggccggtggctggaacacttggcaaaggtaacagcagcttcaggttcagaa

SEQ ID NO: 6277 - RNA, 87 nt, synthetic construct
  source 1..87: mol_type = other RNA
gacacgccccccatgctctttgtgttcattgccctgggccggtggctggaacacttggcaaaggtaacagcagcttcaggttcagaa

SEQ ID NO: 6278 - RNA, 88 nt, synthetic construct
  source 1..88: mol_type = other RNA
cgacacgccccccatgctctttgtgttcattgccctgggccggtggctggaacacttggcaaaggtaacagcagcttcaggttcagaa

SEQ ID NO: 6279 - RNA, 89 nt, synthetic construct
  source 1..89: mol_type = other RNA
tcgacacgccccccatgctctttgtgttcattgccctgggccggtggctggaacacttggcaaaggtaacagcagcttcaggttcagaa

SEQ ID NO: 6280 - RNA, 90 nt, synthetic construct
  source 1..90: mol_type = other RNA
ttcgacacgccccccatgctctttgtgttcattgccctgggccggtggctggaacacttggcaaaggtaacagcagcttcaggttcagaa

SEQ ID NO: 6281 - RNA, 91 nt, synthetic construct
  source 1..91: mol_type = other RNA
cttcgacacgccccccatgctctttgtgttcattgccctgggccggtggctggaacacttggcaaaggtaacagcagcttcaggttcagaa

SEQ ID NO: 6282 - RNA, 92 nt, synthetic construct
  source 1..92: mol_type = other RNA
tcttcgacacgccccccatgctctttgtgttcattgccctgggccggtggctggaacacttggcaaaggtaacagcagcttcaggttcagaa

SEQ ID NO: 6283 - RNA, 93 nt, synthetic construct
  source 1..93: mol_type = other RNA
ttcttcgacacgccccccatgctctttgtgttcattgccctgggccggtggctggaacacttggcaaaggtaacagcagcttcaggttcagaa

SEQ ID NO: 6284 - RNA, 94 nt, synthetic construct
  source 1..94: mol_type = other RNA
attcttcgacacgccccccatgctctttgtgttcattgccctgggccggtggctggaacacttggcaaaggtaacagcagcttcaggttcagaa

SEQ ID NO: 6285 - RNA, 95 nt, synthetic construct
  source 1..95: mol_type = other RNA
cattcttcgacacgccccccatgctctttgtgttcattgccctgggccggtggctggaacacttggcaaaggtaacagcagcttcaggttcagaa

SEQ ID NO: 6286 - RNA, 96 nt, synthetic construct
  source 1..96: mol_type = other RNA
acattcttcgacacgccccccatgctctttgtgttcattgccctgggccggtggctggaacacttggcaaaggtaacagcagcttcaggttcagaa

SEQ ID NO: 6287 - RNA, 97 nt, synthetic construct
  source 1..97: mol_type = other RNA
gacattcttcgacacgccccccatgctctttgtgttcattgccctgggccggtggctggaacacttggcaaaggtaacagcagcttcaggttcagaa

SEQ ID NO: 6288 - RNA, 98 nt, synthetic construct
  source 1..98: mol_type = other RNA
tgacattcttcgacacgccccccatgctctttgtgttcattgccctgggccggtggctggaacacttggcaaaggtaacagcagcttcaggttcagaa

SEQ ID NO: 6289 - RNA, 99 nt, synthetic construct
  source 1..99: mol_type = other RNA
gtgacattcttcgacacgccccccatgctctttgtgttcattgccctgggccggtggctggaacacttggcaaaggtaacagcagcttcaggttcagaa

SEQ ID NO: 6290 - RNA, 100 nt, synthetic construct
  source 1..100: mol_type = other RNA
tgtgacattcttcgacacgccccccatgctctttgtgttcattgccctgggccggtggctggaacacttggcaaaggtaacagcagcttcaggttcagaa

SEQ ID NO: 6291 - RNA, 16 nt, synthetic construct
  source 1..16: mol_type = other RNA
agctcttttctgaacc

SEQ ID NO: 6292 - RNA, 17 nt, synthetic construct
  source 1..17: mol_type = other RNA
cagctcttttctgaacc

SEQ ID NO: 6293 - RNA, 18 nt, synthetic construct
  source 1..18: mol_type = other RNA
gcagctcttttctgaacc

SEQ ID NO: 6294 - RNA, 19 nt, synthetic construct
  source 1..19: mol_type = other RNA
agcagctcttttctgaacc

SEQ ID NO: 6295 - RNA, 20 nt, synthetic construct
  source 1..20: mol_type = other RNA
gagcagctcttttctgaacc

SEQ ID NO: 6296 - RNA, 21 nt, synthetic construct
  source 1..21: mol_type = other RNA
ggagcagctcttttctgaacc

SEQ ID NO: 6297 - RNA, 22 nt, synthetic construct
  source 1..22: mol_type = other RNA
aggagcagctcttttctgaacc

SEQ ID NO: 6298-6304 - skipped (7 entries)

SEQ ID NO: 6305 - RNA, 10 nt, synthetic construct
  source 1..10: mol_type = other RNA
tcagaaaaga

SEQ ID NO: 6306 - RNA, 11 nt, synthetic construct
  source 1..11: mol_type = other RNA
tcagaaaagag

SEQ ID NO: 6307 - RNA, 12 nt, synthetic construct
  source 1..12: mol_type = other RNA
tcagaaaagagc

SEQ ID NO: 6308 - RNA, 13 nt, synthetic construct
  source 1..13: mol_type = other RNA
tcagaaaagagct

SEQ ID NO: 6309 - RNA, 14 nt, synthetic construct
  source 1..14: mol_type = other RNA
tcagaaaagagctg

SEQ ID NO: 6310 - RNA, 15 nt, synthetic construct
  source 1..15: mol_type = other RNA
tcagaaaagagctgc

SEQ ID NO: 6311 - RNA, 16 nt, synthetic construct
  source 1..16: mol_type = other RNA
tcagaaaagagctgct

SEQ ID NO: 6312 - RNA, 17 nt, synthetic construct
  source 1..17: mol_type = other RNA
tcagaaaagagctgctc

SEQ ID NO: 6313 - RNA, 18 nt, synthetic construct
  source 1..18: mol_type = other RNA
tcagaaaagagctgctcc

SEQ ID NO: 6314 - RNA, 19 nt, synthetic construct
  source 1..19: mol_type = other RNA
tcagaaaagagctgctcct

SEQ ID NO: 6315 - RNA, 41 nt, synthetic construct
  source 1..41: mol_type = other RNA
ggtggctggaacacttggcaaaggtaacagcagcttcaggt

SEQ ID NO: 6316 - RNA, 42 nt, synthetic construct
  source 1..42: mol_type = other RNA
cggtggctggaacacttggcaaaggtaacagcagcttcaggt

SEQ ID NO: 6317 - RNA, 43 nt, synthetic construct
  source 1..43: mol_type = other RNA
ccggtggctggaacacttggcaaaggtaacagcagcttcaggt

SEQ ID NO: 6318 - RNA, 44 nt, synthetic construct
  source 1..44: mol_type = other RNA
gccggtggctggaacacttggcaaaggtaacagcagcttcaggt

SEQ ID NO: 6319 - RNA, 45 nt, synthetic construct
  source 1..45: mol_type = other RNA
ggccggtggctggaacacttggcaaaggtaacagcagcttcaggt

SEQ ID NO: 6320 - RNA, 46 nt, synthetic construct
  source 1..46: mol_type = other RNA
gggccggtggctggaacacttggcaaaggtaacagcagcttcaggt

SEQ ID NO: 6321 - RNA, 47 nt, synthetic construct
  source 1..47: mol_type = other RNA
tgggccggtggctggaacacttggcaaaggtaacagcagcttcaggt

SEQ ID NO: 6322 - RNA, 48 nt, synthetic construct
  source 1..48: mol_type = other RNA
ctgggccggtggctggaacacttggcaaaggtaacagcagcttcaggt

SEQ ID NO: 6323 - RNA, 49 nt, synthetic construct
  source 1..49: mol_type = other RNA
cctgggccggtggctggaacacttggcaaaggtaacagcagcttcaggt

SEQ ID NO: 6324 - RNA, 50 nt, synthetic construct
  source 1..50: mol_type = other RNA
ccctgggccggtggctggaacacttggcaaaggtaacagcagcttcaggt

SEQ ID NO: 6325 - RNA, 51 nt, synthetic construct
  source 1..51: mol_type = other RNA
gccctgggccggtggctggaacacttggcaaaggtaacagcagcttcaggt

SEQ ID NO: 6326 - RNA, 52 nt, synthetic construct
  source 1..52: mol_type = other RNA
tgccctgggccggtggctggaacacttggcaaaggtaacagcagcttcaggt

SEQ ID NO: 6327 - RNA, 53 nt, synthetic construct
  source 1..53: mol_type = other RNA
ttgccctgggccggtggctggaacacttggcaaaggtaacagcagcttcaggt

SEQ ID NO: 6328 - RNA, 54 nt, synthetic construct
  source 1..54: mol_type = other RNA
attgccctgggccggtggctggaacacttggcaaaggtaacagcagcttcaggt

SEQ ID NO: 6329 - RNA, 55 nt, synthetic construct
  source 1..55: mol_type = other RNA
cattgccctgggccggtggctggaacacttggcaaaggtaacagcagcttcaggt

SEQ ID NO: 6330 - RNA, 56 nt, synthetic construct
  source 1..56: mol_type = other RNA
tcattgccctgggccggtggctggaacacttggcaaaggtaacagcagcttcaggt

SEQ ID NO: 6331 - RNA, 57 nt, synthetic construct
  source 1..57: mol_type = other RNA
ttcattgccctgggccggtggctggaacacttggcaaaggtaacagcagcttcaggt

SEQ ID NO: 6332 - RNA, 58 nt, synthetic construct
  source 1..58: mol_type = other RNA
gttcattgccctgggccggtggctggaacacttggcaaaggtaacagcagcttcaggt

SEQ ID NO: 6333 - RNA, 59 nt, synthetic construct
  source 1..59: mol_type = other RNA
tgttcattgccctgggccggtggctggaacacttggcaaaggtaacagcagcttcaggt

SEQ ID NO: 6334 - RNA, 60 nt, synthetic construct
  source 1..60: mol_type = other RNA
gtgttcattgccctgggccggtggctggaacacttggcaaaggtaacagcagcttcaggt

SEQ ID NO: 6335 - RNA, 61 nt, synthetic construct
  source 1..61: mol_type = other RNA
tgtgttcattgccctgggccggtggctggaacacttggcaaaggtaacagcagcttcaggt

SEQ ID NO: 6336 - RNA, 62 nt, synthetic construct
  source 1..62: mol_type = other RNA
ttgtgttcattgccctgggccggtggctggaacacttggcaaaggtaacagcagcttcaggt

SEQ ID NO: 6337 - RNA, 63 nt, synthetic construct
  source 1..63: mol_type = other RNA
tttgtgttcattgccctgggccggtggctggaacacttggcaaaggtaacagcagcttcaggt

SEQ ID NO: 6338 - RNA, 64 nt, synthetic construct
  source 1..64: mol_type = other RNA
ctttgtgttcattgccctgggccggtggctggaacacttggcaaaggtaacagcagcttcaggt

SEQ ID NO: 6339 - RNA, 65 nt, synthetic construct
  source 1..65: mol_type = other RNA
tctttgtgttcattgccctgggccggtggctggaacacttggcaaaggtaacagcagcttcaggt

SEQ ID NO: 6340 - RNA, 66 nt, synthetic construct
  source 1..66: mol_type = other RNA
ctctttgtgttcattgccctgggccggtggctggaacacttggcaaaggtaacagcagcttcaggt

SEQ ID NO: 6341 - RNA, 67 nt, synthetic construct
  source 1..67: mol_type = other RNA
gctctttgtgttcattgccctgggccggtggctggaacacttggcaaaggtaacagcagcttcaggt

SEQ ID NO: 6342 - RNA, 68 nt, synthetic construct
  source 1..68: mol_type = other RNA
tgctctttgtgttcattgccctgggccggtggctggaacacttggcaaaggtaacagcagcttcaggt

SEQ ID NO: 6343 - RNA, 69 nt, synthetic construct
  source 1..69: mol_type = other RNA
atgctctttgtgttcattgccctgggccggtggctggaacacttggcaaaggtaacagcagcttcaggt

SEQ ID NO: 6344 - RNA, 70 nt, synthetic construct
  source 1..70: mol_type = other RNA
catgctctttgtgttcattgccctgggccggtggctggaacacttggcaaaggtaacagcagcttcaggt

SEQ ID NO: 6345 - RNA, 71 nt, synthetic construct
  source 1..71: mol_type = other RNA
ccatgctctttgtgttcattgccctgggccggtggctggaacacttggcaaaggtaacagcagcttcaggt

SEQ ID NO: 6346 - RNA, 72 nt, synthetic construct
  source 1..72: mol_type = other RNA
cccatgctctttgtgttcattgccctgggccggtggctggaacacttggcaaaggtaacagcagcttcaggt

SEQ ID NO: 6347 - RNA, 73 nt, synthetic construct
  source 1..73: mol_type = other RNA
ccccatgctctttgtgttcattgccctgggccggtggctggaacacttggcaaaggtaacagcagcttcaggt

SEQ ID NO: 6348 - RNA, 74 nt, synthetic construct
  source 1..74: mol_type = other RNA
cccccatgctctttgtgttcattgccctgggccggtggctggaacacttggcaaaggtaacagcagcttcaggt

SEQ ID NO: 6349 - RNA, 75 nt, synthetic construct
  source 1..75: mol_type = other RNA
ccccccatgctctttgtgttcattgccctgggccggtggctggaacacttggcaaaggtaacagcagcttcaggt

SEQ ID NO: 6350 - RNA, 76 nt, synthetic construct
  source 1..76: mol_type = other RNA
gccccccatgctctttgtgttcattgccctgggccggtggctggaacacttggcaaaggtaacagcagcttcaggt

SEQ ID NO: 6351 - RNA, 77 nt, synthetic construct
  source 1..77: mol_type = other RNA
cgccccccatgctctttgtgttcattgccctgggccggtggctggaacacttggcaaaggtaacagcagcttcaggt

SEQ ID NO: 6352 - RNA, 78 nt, synthetic construct
  source 1..78: mol_type = other RNA
acgccccccatgctctttgtgttcattgccctgggccggtggctggaacacttggcaaaggtaacagcagcttcaggt

SEQ ID NO: 6353 - RNA, 79 nt, synthetic construct
  source 1..79: mol_type = other RNA
cacgccccccatgctctttgtgttcattgccctgggccggtggctggaacacttggcaaaggtaacagcagcttcaggt

SEQ ID NO: 6354 - RNA, 80 nt, synthetic construct
  source 1..80: mol_type = other RNA
acacgccccccatgctctttgtgttcattgccctgggccggtggctggaacacttggcaaaggtaacagcagcttcaggt

SEQ ID NO: 6355 - RNA, 81 nt, synthetic construct
  source 1..81: mol_type = other RNA
gacacgccccccatgctctttgtgttcattgccctgggccggtggctggaacacttggcaaaggtaacagcagcttcaggt

SEQ ID NO: 6356 - RNA, 82 nt, synthetic construct
  source 1..82: mol_type = other RNA
cgacacgccccccatgctctttgtgttcattgccctgggccggtggctggaacacttggcaaaggtaacagcagcttcaggt

SEQ ID NO: 6357 - RNA, 83 nt, synthetic construct
  source 1..83: mol_type = other RNA
tcgacacgccccccatgctctttgtgttcattgccctgggccggtggctggaacacttggcaaaggtaacagcagcttcaggt

SEQ ID NO: 6358 - RNA, 84 nt, synthetic construct
  source 1..84: mol_type = other RNA
ttcgacacgccccccatgctctttgtgttcattgccctgggccggtggctggaacacttggcaaaggtaacagcagcttcaggt

SEQ ID NO: 6359 - RNA, 85 nt, synthetic construct
  source 1..85: mol_type = other RNA
cttcgacacgccccccatgctctttgtgttcattgccctgggccggtggctggaacacttggcaaaggtaacagcagcttcaggt

SEQ ID NO: 6360 - RNA, 86 nt, synthetic construct
  source 1..86: mol_type = other RNA
tcttcgacacgccccccatgctctttgtgttcattgccctgggccggtggctggaacacttggcaaaggtaacagcagcttcaggt

SEQ ID NO: 6361 - RNA, 87 nt, synthetic construct
  source 1..87: mol_type = other RNA
ttcttcgacacgccccccatgctctttgtgttcattgccctgggccggtggctggaacacttggcaaaggtaacagcagcttcaggt

SEQ ID NO: 6362 - RNA, 88 nt, synthetic construct
  source 1..88: mol_type = other RNA
attcttcgacacgccccccatgctctttgtgttcattgccctgggccggtggctggaacacttggcaaaggtaacagcagcttcaggt

SEQ ID NO: 6363 - RNA, 89 nt, synthetic construct
  source 1..89: mol_type = other RNA
cattcttcgacacgccccccatgctctttgtgttcattgccctgggccggtggctggaacacttggcaaaggtaacagcagcttcaggt

SEQ ID NO: 6364 - RNA, 90 nt, synthetic construct
  source 1..90: mol_type = other RNA
acattcttcgacacgccccccatgctctttgtgttcattgccctgggccggtggctggaacacttggcaaaggtaacagcagcttcaggt

SEQ ID NO: 6365 - RNA, 91 nt, synthetic construct
  source 1..91: mol_type = other RNA
gacattcttcgacacgccccccatgctctttgtgttcattgccctgggccggtggctggaacacttggcaaaggtaacagcagcttcaggt

SEQ ID NO: 6366 - RNA, 92 nt, synthetic construct
  source 1..92: mol_type = other RNA
tgacattcttcgacacgccccccatgctctttgtgttcattgccctgggccggtggctggaacacttggcaaaggtaacagcagcttcaggt

SEQ ID NO: 6367 - RNA, 93 nt, synthetic construct
  source 1..93: mol_type = other RNA
gtgacattcttcgacacgccccccatgctctttgtgttcattgccctgggccggtggctggaacacttggcaaaggtaacagcagcttcaggt

SEQ ID NO: 6368 - RNA, 94 nt, synthetic construct
  source 1..94: mol_type = other RNA
tgtgacattcttcgacacgccccccatgctctttgtgttcattgccctgggccggtggctggaacacttggcaaaggtaacagcagcttcaggt

SEQ ID NO: 6369 - RNA, 95 nt, synthetic construct
  source 1..95: mol_type = other RNA
ctgtgacattcttcgacacgccccccatgctctttgtgttcattgccctgggccggtggctggaacacttggcaaaggtaacagcagcttcaggt

SEQ ID NO: 6370 - RNA, 96 nt, synthetic construct
  source 1..96: mol_type = other RNA
cctgtgacattcttcgacacgccccccatgctctttgtgttcattgccctgggccggtggctggaacacttggcaaaggtaacagcagcttcaggt

SEQ ID NO: 6371 - RNA, 97 nt, synthetic construct
  source 1..97: mol_type = other RNA
ccctgtgacattcttcgacacgccccccatgctctttgtgttcattgccctgggccggtggctggaacacttggcaaaggtaacagcagcttcaggt

SEQ ID NO: 6372 - RNA, 98 nt, synthetic construct
  source 1..98: mol_type = other RNA
gccctgtgacattcttcgacacgccccccatgctctttgtgttcattgccctgggccggtggctggaacacttggcaaaggtaacagcagcttcaggt

SEQ ID NO: 6373 - RNA, 99 nt, synthetic construct
  source 1..99: mol_type = other RNA
agccctgtgacattcttcgacacgccccccatgctctttgtgttcattgccctgggccggtggctggaacacttggcaaaggtaacagcagcttcaggt

SEQ ID NO: 6374 - RNA, 100 nt, synthetic construct
  source 1..100: mol_type = other RNA
gagccctgtgacattcttcgacacgccccccatgctctttgtgttcattgccctgggccggtggctggaacacttggcaaaggtaacagcagcttcaggt

SEQ ID NO: 6375 - RNA, 16 nt, synthetic construct
  source 1..16: mol_type = other RNA
ggtggttgctgtggct

SEQ ID NO: 6376 - RNA, 17 nt, synthetic construct
  source 1..17: mol_type = other RNA
tggtggttgctgtggct

SEQ ID NO: 6377 - RNA, 18 nt, synthetic construct
  source 1..18: mol_type = other RNA
ctggtggttgctgtggct

SEQ ID NO: 6378 - RNA, 19 nt, synthetic construct
  source 1..19: mol_type = other RNA
cctggtggttgctgtggct

SEQ ID NO: 6379 - RNA, 20 nt, synthetic construct
  source 1..20: mol_type = other RNA
tcctggtggttgctgtggct

SEQ ID NO: 6380 - RNA, 21 nt, synthetic construct
  source 1..21: mol_type = other RNA
atcctggtggttgctgtggct

SEQ ID NO: 6381 - RNA, 22 nt, synthetic construct
  source 1..22: mol_type = other RNA
catcctggtggttgctgtggct

SEQ ID NO: 6382-6387 - skipped (6 entries)

SEQ ID NO: 6388 - RNA, 10 nt, synthetic construct
  source 1..10: mol_type = other RNA
cacagcaacc

SEQ ID NO: 6389 - RNA, 11 nt, synthetic construct
  source 1..11: mol_type = other RNA
cacagcaacca

SEQ ID NO: 6390 - RNA, 12 nt, synthetic construct
  source 1..12: mol_type = other RNA
cacagcaaccac

SEQ ID NO: 6391 - RNA, 13 nt, synthetic construct
  source 1..13: mol_type = other RNA
cacagcaaccacc

SEQ ID NO: 6392 - RNA, 14 nt, synthetic construct
  source 1..14: mol_type = other RNA
cacagcaaccacca

SEQ ID NO: 6393 - RNA, 15 nt, synthetic construct
  source 1..15: mol_type = other RNA
cacagcaaccaccag

SEQ ID NO: 6394 - RNA, 16 nt, synthetic construct
  source 1..16: mol_type = other RNA
cacagcaaccaccagg

SEQ ID NO: 6395 - RNA, 17 nt, synthetic construct
  source 1..17: mol_type = other RNA
cacagcaaccaccagga

SEQ ID NO: 6396 - RNA, 18 nt, synthetic construct
  source 1..18: mol_type = other RNA
cacagcaaccaccaggat

SEQ ID NO: 6397 - RNA, 19 nt, synthetic construct
  source 1..19: mol_type = other RNA
cacagcaaccaccaggatg

SEQ ID NO: 6398 - RNA, 77 nt, synthetic construct
  source 1..77: mol_type = other RNA
cggcccagggcaatgaacacaaagagcatggggggcgtgtcgaagaatgtcacagggctcctctccgccttttcagc

SEQ ID NO: 6399 - RNA, 77 nt, synthetic construct
  source 1..77: mol_type = other RNA
cggcccagggcaatgaacacaaagagcatggggggcgtgtcgaagaatgtcacagggctcctctccgccttctcagc

SEQ ID NO: 6400 - RNA, 78 nt, synthetic construct
  source 1..78: mol_type = other RNA
ccggcccagggcaatgaacacaaagagcatggggggcgtgtcgaagaatgtcacagggctcctctccgccttttcagc

SEQ ID NO: 6401 - RNA, 78 nt, synthetic construct
  source 1..78: mol_type = other RNA
ccggcccagggcaatgaacacaaagagcatggggggcgtgtcgaagaatgtcacagggctcctctccgccttctcagc

SEQ ID NO: 6402 - RNA, 79 nt, synthetic construct
  source 1..79: mol_type = other RNA
accggcccagggcaatgaacacaaagagcatggggggcgtgtcgaagaatgtcacagggctcctctccgccttttcagc

SEQ ID NO: 6403 - RNA, 79 nt, synthetic construct
  source 1..79: mol_type = other RNA
accggcccagggcaatgaacacaaagagcatggggggcgtgtcgaagaatgtcacagggctcctctccgccttctcagc

SEQ ID NO: 6404 - RNA, 80 nt, synthetic construct
  source 1..80: mol_type = other RNA
caccggcccagggcaatgaacacaaagagcatggggggcgtgtcgaagaatgtcacagggctcctctccgccttctcagc

SEQ ID NO: 6405 - RNA, 80 nt, synthetic construct
  source 1..80: mol_type = other RNA
caccggcccagggcaatgaacacaaagagcatggggggcgtgtcgaagaatgtcacagggctcctctccgccttttcagc

SEQ ID NO: 6406 - RNA, 81 nt, synthetic construct
  source 1..81: mol_type = other RNA
ccaccggcccagggcaatgaacacaaagagcatggggggcgtgtcgaagaatgtcacagggctcctctccgccttttcagc

SEQ ID NO: 6407 - RNA, 81 nt, synthetic construct
  source 1..81: mol_type = other RNA
ccaccggcccagggcaatgaacacaaagagcatggggggcgtgtcgaagaatgtcacagggctcctctccgccttctcagc

SEQ ID NO: 6408 - RNA, 82 nt, synthetic construct
  source 1..82: mol_type = other RNA
gccaccggcccagggcaatgaacacaaagagcatggggggcgtgtcgaagaatgtcacagggctcctctccgccttctcagc

SEQ ID NO: 6409 - RNA, 82 nt, synthetic construct
  source 1..82: mol_type = other RNA
gccaccggcccagggcaatgaacacaaagagcatggggggcgtgtcgaagaatgtcacagggctcctctccgccttttcagc

SEQ ID NO: 6410 - RNA, 83 nt, synthetic construct
  source 1..83: mol_type = other RNA
agccaccggcccagggcaatgaacacaaagagcatggggggcgtgtcgaagaatgtcacagggctcctctccgccttctcagc

SEQ ID NO: 6411 - RNA, 83 nt, synthetic construct
  source 1..83: mol_type = other RNA
agccaccggcccagggcaatgaacacaaagagcatggggggcgtgtcgaagaatgtcacagggctcctctccgccttttcagc

SEQ ID NO: 6412 - RNA, 84 nt, synthetic construct
  source 1..84: mol_type = other RNA
cagccaccggcccagggcaatgaacacaaagagcatggggggcgtgtcgaagaatgtcacagggctcctctccgccttctcagc

SEQ ID NO: 6413 - RNA, 84 nt, synthetic construct
  source 1..84: mol_type = other RNA
cagccaccggcccagggcaatgaacacaaagagcatggggggcgtgtcgaagaatgtcacagggctcctctccgccttttcagc

SEQ ID NO: 6414 - RNA, 85 nt, synthetic construct
  source 1..85: mol_type = other RNA
ccagccaccggcccagggcaatgaacacaaagagcatggggggcgtgtcgaagaatgtcacagggctcctctccgccttttcagc

SEQ ID NO: 6415 - RNA, 85 nt, synthetic construct
  source 1..85: mol_type = other RNA
ccagccaccggcccagggcaatgaacacaaagagcatggggggcgtgtcgaagaatgtcacagggctcctctccgccttctcagc

SEQ ID NO: 6416 - RNA, 86 nt, synthetic construct
  source 1..86: mol_type = other RNA
tccagccaccggcccagggcaatgaacacaaagagcatggggggcgtgtcgaagaatgtcacagggctcctctccgccttttcagc

SEQ ID NO: 6417 - RNA, 86 nt, synthetic construct
  source 1..86: mol_type = other RNA
tccagccaccggcccagggcaatgaacacaaagagcatggggggcgtgtcgaagaatgtcacagggctcctctccgccttctcagc

SEQ ID NO: 6418 - RNA, 87 nt, synthetic construct
  source 1..87: mol_type = other RNA
ttccagccaccggcccagggcaatgaacacaaagagcatggggggcgtgtcgaagaatgtcacagggctcctctccgccttttcagc

SEQ ID NO: 6419 - RNA, 87 nt, synthetic construct
  source 1..87: mol_type = other RNA
ttccagccaccggcccagggcaatgaacacaaagagcatggggggcgtgtcgaagaatgtcacagggctcctctccgccttctcagc

SEQ ID NO: 6420 - RNA, 88 nt, synthetic construct
  source 1..88: mol_type = other RNA
gttccagccaccggcccagggcaatgaacacaaagagcatggggggcgtgtcgaagaatgtcacagggctcctctccgccttttcagc

SEQ ID NO: 6421 - RNA, 88 nt, synthetic construct
  source 1..88: mol_type = other RNA
gttccagccaccggcccagggcaatgaacacaaagagcatggggggcgtgtcgaagaatgtcacagggctcctctccgccttctcagc

SEQ ID NO: 6422 - RNA, 89 nt, synthetic construct
  source 1..89: mol_type = other RNA
tgttccagccaccggcccagggcaatgaacacaaagagcatggggggcgtgtcgaagaatgtcacagggctcctctccgccttttcagc

SEQ ID NO: 6423 - RNA, 89 nt, synthetic construct
  source 1..89: mol_type = other RNA
tgttccagccaccggcccagggcaatgaacacaaagagcatggggggcgtgtcgaagaatgtcacagggctcctctccgccttctcagc

SEQ ID NO: 6424 - RNA, 90 nt, synthetic construct
  source 1..90: mol_type = other RNA
gtgttccagccaccggcccagggcaatgaacacaaagagcatggggggcgtgtcgaagaatgtcacagggctcctctccgccttttcagc

SEQ ID NO: 6425 - RNA, 90 nt, synthetic construct
  source 1..90: mol_type = other RNA
gtgttccagccaccggcccagggcaatgaacacaaagagcatggggggcgtgtcgaagaatgtcacagggctcctctccgccttctcagc

SEQ ID NO: 6426 - RNA, 91 nt, synthetic construct
  source 1..91: mol_type = other RNA
agtgttccagccaccggcccagggcaatgaacacaaagagcatggggggcgtgtcgaagaatgtcacagggctcctctccgccttttcagc

SEQ ID NO: 6427 - RNA, 91 nt, synthetic construct
  source 1..91: mol_type = other RNA
agtgttccagccaccggcccagggcaatgaacacaaagagcatggggggcgtgtcgaagaatgtcacagggctcctctccgccttctcagc

SEQ ID NO: 6428 - RNA, 92 nt, synthetic construct
  source 1..92: mol_type = other RNA
aagtgttccagccaccggcccagggcaatgaacacaaagagcatggggggcgtgtcgaagaatgtcacagggctcctctccgccttctcagc

SEQ ID NO: 6429 - RNA, 92 nt, synthetic construct
  source 1..92: mol_type = other RNA
aagtgttccagccaccggcccagggcaatgaacacaaagagcatggggggcgtgtcgaagaatgtcacagggctcctctccgccttttcagc

SEQ ID NO: 6430 - RNA, 93 nt, synthetic construct
  source 1..93: mol_type = other RNA
caagtgttccagccaccggcccagggcaatgaacacaaagagcatggggggcgtgtcgaagaatgtcacagggctcctctccgccttttcagc

SEQ ID NO: 6431 - RNA, 93 nt, synthetic construct
  source 1..93: mol_type = other RNA
caagtgttccagccaccggcccagggcaatgaacacaaagagcatggggggcgtgtcgaagaatgtcacagggctcctctccgccttctcagc

SEQ ID NO: 6432 - RNA, 94 nt, synthetic construct
  source 1..94: mol_type = other RNA
ccaagtgttccagccaccggcccagggcaatgaacacaaagagcatggggggcgtgtcgaagaatgtcacagggctcctctccgccttttcagc

SEQ ID NO: 6433 - RNA, 94 nt, synthetic construct
  source 1..94: mol_type = other RNA
ccaagtgttccagccaccggcccagggcaatgaacacaaagagcatggggggcgtgtcgaagaatgtcacagggctcctctccgccttctcagc

SEQ ID NO: 6434 - RNA, 95 nt, synthetic construct
  source 1..95: mol_type = other RNA
gccaagtgttccagccaccggcccagggcaatgaacacaaagagcatggggggcgtgtcgaagaatgtcacagggctcctctccgccttttcagc

SEQ ID NO: 6435 - RNA, 95 nt, synthetic construct
  source 1..95: mol_type = other RNA
gccaagtgttccagccaccggcccagggcaatgaacacaaagagcatggggggcgtgtcgaagaatgtcacagggctcctctccgccttctcagc

SEQ ID NO: 6436 - RNA, 96 nt, synthetic construct
  source 1..96: mol_type = other RNA
tgccaagtgttccagccaccggcccagggcaatgaacacaaagagcatggggggcgtgtcgaagaatgtcacagggctcctctccgccttttcagc

SEQ ID NO: 6437 - RNA, 96 nt, synthetic construct
  source 1..96: mol_type = other RNA
tgccaagtgttccagccaccggcccagggcaatgaacacaaagagcatggggggcgtgtcgaagaatgtcacagggctcctctccgccttctcagc

SEQ ID NO: 6438 - RNA, 97 nt, synthetic construct
  source 1..97: mol_type = other RNA
ttgccaagtgttccagccaccggcccagggcaatgaacacaaagagcatggggggcgtgtcgaagaatgtcacagggctcctctccgccttctcagc

SEQ ID NO: 6439 - RNA, 97 nt, synthetic construct
  source 1..97: mol_type = other RNA
ttgccaagtgttccagccaccggcccagggcaatgaacacaaagagcatggggggcgtgtcgaagaatgtcacagggctcctctccgccttttcagc

SEQ ID NO: 6440 - RNA, 98 nt, synthetic construct
  source 1..98: mol_type = other RNA
tttgccaagtgttccagccaccggcccagggcaatgaacacaaagagcatggggggcgtgtcgaagaatgtcacagggctcctctccgccttttcagc

SEQ ID NO: 6441 - RNA, 98 nt, synthetic construct
  source 1..98: mol_type = other RNA
tttgccaagtgttccagccaccggcccagggcaatgaacacaaagagcatggggggcgtgtcgaagaatgtcacagggctcctctccgccttctcagc

SEQ ID NO: 6442 - RNA, 99 nt, synthetic construct
  source 1..99: mol_type = other RNA
ctttgccaagtgttccagccaccggcccagggcaatgaacacaaagagcatggggggcgtgtcgaagaatgtcacagggctcctctccgccttctcagc

SEQ ID NO: 6443 - RNA, 99 nt, synthetic construct
  source 1..99: mol_type = other RNA
ctttgccaagtgttccagccaccggcccagggcaatgaacacaaagagcatggggggcgtgtcgaagaatgtcacagggctcctctccgccttttcagc

SEQ ID NO: 6444 - RNA, 100 nt, synthetic construct
  source 1..100: mol_type = other RNA
cctttgccaagtgttccagccaccggcccagggcaatgaacacaaagagcatggggggcgtgtcgaagaatgtcacagggctcctctccgccttctcagc

SEQ ID NO: 6445 - RNA, 100 nt, synthetic construct
  source 1..100: mol_type = other RNA
cctttgccaagtgttccagccaccggcccagggcaatgaacacaaagagcatggggggcgtgtcgaagaatgtcacagggctcctctccgccttttcagc

SEQ ID NO: 6446 - RNA, 20 nt, synthetic construct
  source 1..20: mol_type = other RNA
aagctgctgttacctttgcc

SEQ ID NO: 6447 - RNA, 20 nt, synthetic construct
  source 1..20: mol_type = other RNA
cctctccgccttttcagcca

SEQ ID NO: 6448 - RNA, 20 nt, synthetic construct
  source 1..20: mol_type = other RNA
gttacctttgccaagtgttc

SEQ ID NO: 6449 - RNA, 20 nt, synthetic construct
  source 1..20: mol_type = other RNA
gggcgtgtcgaagaatgtca

SEQ ID NO: 6450 - RNA, 20 nt, synthetic construct
  source 1..20: mol_type = other RNA
agggctcctctccgccttct

SEQ ID NO: 6451 - RNA, 20 nt, synthetic construct
  source 1..20: mol_type = other RNA
cctctccgccttctcagcca

SEQ ID NO: 6452 - RNA, 20 nt, synthetic construct
  source 1..20: mol_type = other RNA
agggctcctctccgcctttt

SEQ ID NO: 6453 - RNA, 20 nt, synthetic construct
  source 1..20: mol_type = other RNA
agagcatggggggcgtgtcg

SEQ ID NO: 6454 - RNA, 20 nt, synthetic construct
  source 1..20: mol_type = other RNA
cttcctctgaacaccatgtt

SEQ ID NO: 6455 - RNA, 20 nt, synthetic construct
  source 1..20: mol_type = other RNA
ttctcagccacagcaaccac

SEQ ID NO: 6456 - RNA, 20 nt, synthetic construct
  source 1..20: mol_type = other RNA
ggcccagggcaatgaacaca

SEQ ID NO: 6457 - RNA, 20 nt, synthetic construct
  source 1..20: mol_type = other RNA
cccagggcaatgaacacaaa

SEQ ID NO: 6458 - RNA, 16 nt, synthetic construct
  source 1..16: mol_type = other RNA
ggttgctgtggctgag

SEQ ID NO: 6459 - RNA, 17 nt, synthetic construct
  source 1..17: mol_type = other RNA
tggttgctgtggctgag

SEQ ID NO: 6460 - RNA, 18 nt, synthetic construct
  source 1..18: mol_type = other RNA
gtggttgctgtggctgag

SEQ ID NO: 6461 - RNA, 19 nt, synthetic construct
  source 1..19: mol_type = other RNA
ggtggttgctgtggctgag

SEQ ID NO: 6462 - RNA, 20 nt, synthetic construct
  source 1..20: mol_type = other RNA
tggtggttgctgtggctgag

SEQ ID NO: 6463 - RNA, 21 nt, synthetic construct
  source 1..21: mol_type = other RNA
ctggtggttgctgtggctgag

SEQ ID NO: 6464 - RNA, 22 nt, synthetic construct
  source 1..22: mol_type = other RNA
cctggtggttgctgtggctgag

SEQ ID NO: 6465-6471 - skipped (7 entries)

SEQ ID NO: 6472 - RNA, 10 nt, synthetic construct
  source 1..10: mol_type = other RNA
agccacagca

SEQ ID NO: 6473 - RNA, 11 nt, synthetic construct
  source 1..11: mol_type = other RNA
agccacagcaa

SEQ ID NO: 6474 - RNA, 12 nt, synthetic construct
  source 1..12: mol_type = other RNA
agccacagcaac

SEQ ID NO: 6475 - RNA, 13 nt, synthetic construct
  source 1..13: mol_type = other RNA
agccacagcaacc

SEQ ID NO: 6476 - RNA, 14 nt, synthetic construct
  source 1..14: mol_type = other RNA
agccacagcaacca

SEQ ID NO: 6477 - RNA, 15 nt, synthetic construct
  source 1..15: mol_type = other RNA
agccacagcaaccac

SEQ ID NO: 6478 - RNA, 16 nt, synthetic construct
  source 1..16: mol_type = other RNA
agccacagcaaccacc

SEQ ID NO: 6479 - RNA, 17 nt, synthetic construct
  source 1..17: mol_type = other RNA
agccacagcaaccacca

SEQ ID NO: 6480 - RNA, 18 nt, synthetic construct
  source 1..18: mol_type = other RNA
agccacagcaaccaccag

SEQ ID NO: 6481 - RNA, 19 nt, synthetic construct
  source 1..19: mol_type = other RNA
agccacagcaaccaccagg

SEQ ID NO: 6482 - RNA, 74 nt, synthetic construct
  source 1..74: mol_type = other RNA
cggcccagggcaatgaacacaaagagcatggggggcgtgtcgaagaatgtcacagggctcctctccgccttctc

SEQ ID NO: 6483 - RNA, 74 nt, synthetic construct
  source 1..74: mol_type = other RNA
cggcccagggcaatgaacacaaagagcatggggggcgtgtcgaagaatgtcacagggctcctctccgctttctc

SEQ ID NO: 6484 - RNA, 75 nt, synthetic construct
  source 1..75: mol_type = other RNA
ccggcccagggcaatgaacacaaagagcatggggggcgtgtcgaagaatgtcacagggctcctctccgccttctc

SEQ ID NO: 6485 - RNA, 75 nt, synthetic construct
  source 1..75: mol_type = other RNA
ccggcccagggcaatgaacacaaagagcatggggggcgtgtcgaagaatgtcacagggctcctctccgctttctc

SEQ ID NO: 6486 - RNA, 76 nt, synthetic construct
  source 1..76: mol_type = other RNA
accggcccagggcaatgaacacaaagagcatggggggcgtgtcgaagaatgtcacagggctcctctccgccttctc

SEQ ID NO: 6487 - RNA, 76 nt, synthetic construct
  source 1..76: mol_type = other RNA
accggcccagggcaatgaacacaaagagcatggggggcgtgtcgaagaatgtcacagggctcctctccgctttctc

SEQ ID NO: 6488 - RNA, 77 nt, synthetic construct
  source 1..77: mol_type = other RNA
caccggcccagggcaatgaacacaaagagcatggggggcgtgtcgaagaatgtcacagggctcctctccgctttctc

SEQ ID NO: 6489 - RNA, 77 nt, synthetic construct
  source 1..77: mol_type = other RNA
caccggcccagggcaatgaacacaaagagcatggggggcgtgtcgaagaatgtcacagggctcctctccgccttctc

SEQ ID NO: 6490 - RNA, 78 nt, synthetic construct
  source 1..78: mol_type = other RNA
ccaccggcccagggcaatgaacacaaagagcatggggggcgtgtcgaagaatgtcacagggctcctctccgccttctc

SEQ ID NO: 6491 - RNA, 78 nt, synthetic construct
  source 1..78: mol_type = other RNA
ccaccggcccagggcaatgaacacaaagagcatggggggcgtgtcgaagaatgtcacagggctcctctccgctttctc

SEQ ID NO: 6492 - RNA, 79 nt, synthetic construct
  source 1..79: mol_type = other RNA
gccaccggcccagggcaatgaacacaaagagcatggggggcgtgtcgaagaatgtcacagggctcctctccgctttctc

SEQ ID NO: 6493 - RNA, 79 nt, synthetic construct
  source 1..79: mol_type = other RNA
gccaccggcccagggcaatgaacacaaagagcatggggggcgtgtcgaagaatgtcacagggctcctctccgccttctc

SEQ ID NO: 6494 - RNA, 80 nt, synthetic construct
  source 1..80: mol_type = other RNA
agccaccggcccagggcaatgaacacaaagagcatggggggcgtgtcgaagaatgtcacagggctcctctccgctttctc

SEQ ID NO: 6495 - RNA, 80 nt, synthetic construct
  source 1..80: mol_type = other RNA
agccaccggcccagggcaatgaacacaaagagcatggggggcgtgtcgaagaatgtcacagggctcctctccgccttctc

SEQ ID NO: 6496 - RNA, 81 nt, synthetic construct
  source 1..81: mol_type = other RNA
cagccaccggcccagggcaatgaacacaaagagcatggggggcgtgtcgaagaatgtcacagggctcctctccgctttctc

SEQ ID NO: 6497 - RNA, 81 nt, synthetic construct
  source 1..81: mol_type = other RNA
cagccaccggcccagggcaatgaacacaaagagcatggggggcgtgtcgaagaatgtcacagggctcctctccgccttctc

SEQ ID NO: 6498 - RNA, 82 nt, synthetic construct
  source 1..82: mol_type = other RNA
ccagccaccggcccagggcaatgaacacaaagagcatggggggcgtgtcgaagaatgtcacagggctcctctccgccttctc

SEQ ID NO: 6499 - RNA, 82 nt, synthetic construct
  source 1..82: mol_type = other RNA
ccagccaccggcccagggcaatgaacacaaagagcatggggggcgtgtcgaagaatgtcacagggctcctctccgctttctc

SEQ ID NO: 6500 - RNA, 83 nt, synthetic construct
  source 1..83: mol_type = other RNA
tccagccaccggcccagggcaatgaacacaaagagcatggggggcgtgtcgaagaatgtcacagggctcctctccgccttctc

SEQ ID NO: 6501 - RNA, 83 nt, synthetic construct
  source 1..83: mol_type = other RNA
tccagccaccggcccagggcaatgaacacaaagagcatggggggcgtgtcgaagaatgtcacagggctcctctccgctttctc

SEQ ID NO: 6502 - RNA, 84 nt, synthetic construct
  source 1..84: mol_type = other RNA
ttccagccaccggcccagggcaatgaacacaaagagcatggggggcgtgtcgaagaatgtcacagggctcctctccgccttctc

SEQ ID NO: 6503 - RNA, 84 nt, synthetic construct
  source 1..84: mol_type = other RNA
ttccagccaccggcccagggcaatgaacacaaagagcatggggggcgtgtcgaagaatgtcacagggctcctctccgctttctc

SEQ ID NO: 6504 - RNA, 85 nt, synthetic construct
  source 1..85: mol_type = other RNA
gttccagccaccggcccagggcaatgaacacaaagagcatggggggcgtgtcgaagaatgtcacagggctcctctccgccttctc

SEQ ID NO: 6505 - RNA, 85 nt, synthetic construct
  source 1..85: mol_type = other RNA
gttccagccaccggcccagggcaatgaacacaaagagcatggggggcgtgtcgaagaatgtcacagggctcctctccgctttctc

SEQ ID NO: 6506 - RNA, 86 nt, synthetic construct
  source 1..86: mol_type = other RNA
tgttccagccaccggcccagggcaatgaacacaaagagcatggggggcgtgtcgaagaatgtcacagggctcctctccgctttctc

SEQ ID NO: 6507 - RNA, 86 nt, synthetic construct
  source 1..86: mol_type = other RNA
tgttccagccaccggcccagggcaatgaacacaaagagcatggggggcgtgtcgaagaatgtcacagggctcctctccgccttctc

SEQ ID NO: 6508 - RNA, 87 nt, synthetic construct
  source 1..87: mol_type = other RNA
gtgttccagccaccggcccagggcaatgaacacaaagagcatggggggcgtgtcgaagaatgtcacagggctcctctccgccttctc

SEQ ID NO: 6509 - RNA, 87 nt, synthetic construct
  source 1..87: mol_type = other RNA
gtgttccagccaccggcccagggcaatgaacacaaagagcatggggggcgtgtcgaagaatgtcacagggctcctctccgctttctc

SEQ ID NO: 6510 - RNA, 88 nt, synthetic construct
  source 1..88: mol_type = other RNA
agtgttccagccaccggcccagggcaatgaacacaaagagcatggggggcgtgtcgaagaatgtcacagggctcctctccgctttctc

SEQ ID NO: 6511 - RNA, 88 nt, synthetic construct
  source 1..88: mol_type = other RNA
agtgttccagccaccggcccagggcaatgaacacaaagagcatggggggcgtgtcgaagaatgtcacagggctcctctccgccttctc

SEQ ID NO: 6512 - RNA, 89 nt, synthetic construct
  source 1..89: mol_type = other RNA
aagtgttccagccaccggcccagggcaatgaacacaaagagcatggggggcgtgtcgaagaatgtcacagggctcctctccgccttctc

SEQ ID NO: 6513 - RNA, 89 nt, synthetic construct
  source 1..89: mol_type = other RNA
aagtgttccagccaccggcccagggcaatgaacacaaagagcatggggggcgtgtcgaagaatgtcacagggctcctctccgctttctc

SEQ ID NO: 6514 - RNA, 90 nt, synthetic construct
  source 1..90: mol_type = other RNA
caagtgttccagccaccggcccagggcaatgaacacaaagagcatggggggcgtgtcgaagaatgtcacagggctcctctccgctttctc

SEQ ID NO: 6515 - RNA, 90 nt, synthetic construct
  source 1..90: mol_type = other RNA
caagtgttccagccaccggcccagggcaatgaacacaaagagcatggggggcgtgtcgaagaatgtcacagggctcctctccgccttctc

SEQ ID NO: 6516 - RNA, 91 nt, synthetic construct
  source 1..91: mol_type = other RNA
ccaagtgttccagccaccggcccagggcaatgaacacaaagagcatggggggcgtgtcgaagaatgtcacagggctcctctccgctttctc

SEQ ID NO: 6517 - RNA, 91 nt, synthetic construct
  source 1..91: mol_type = other RNA
ccaagtgttccagccaccggcccagggcaatgaacacaaagagcatggggggcgtgtcgaagaatgtcacagggctcctctccgccttctc

SEQ ID NO: 6518 - RNA, 92 nt, synthetic construct
  source 1..92: mol_type = other RNA
gccaagtgttccagccaccggcccagggcaatgaacacaaagagcatggggggcgtgtcgaagaatgtcacagggctcctctccgccttctc

SEQ ID NO: 6519 - RNA, 92 nt, synthetic construct
  source 1..92: mol_type = other RNA
gccaagtgttccagccaccggcccagggcaatgaacacaaagagcatggggggcgtgtcgaagaatgtcacagggctcctctccgctttctc

SEQ ID NO: 6520 - RNA, 93 nt, synthetic construct
  source 1..93: mol_type = other RNA
tgccaagtgttccagccaccggcccagggcaatgaacacaaagagcatggggggcgtgtcgaagaatgtcacagggctcctctccgctttctc

SEQ ID NO: 6521 - RNA, 93 nt, synthetic construct
  source 1..93: mol_type = other RNA
tgccaagtgttccagccaccggcccagggcaatgaacacaaagagcatggggggcgtgtcgaagaatgtcacagggctcctctccgccttctc

SEQ ID NO: 6522 - RNA, 94 nt, synthetic construct
  source 1..94: mol_type = other RNA
ttgccaagtgttccagccaccggcccagggcaatgaacacaaagagcatggggggcgtgtcgaagaatgtcacagggctcctctccgctttctc

SEQ ID NO: 6523 - RNA, 94 nt, synthetic construct
  source 1..94: mol_type = other RNA
ttgccaagtgttccagccaccggcccagggcaatgaacacaaagagcatggggggcgtgtcgaagaatgtcacagggctcctctccgccttctc

SEQ ID NO: 6524 - RNA, 95 nt, synthetic construct
  source 1..95: mol_type = other RNA
tttgccaagtgttccagccaccggcccagggcaatgaacacaaagagcatggggggcgtgtcgaagaatgtcacagggctcctctccgccttctc

SEQ ID NO: 6525 - RNA, 95 nt, synthetic construct
  source 1..95: mol_type = other RNA
tttgccaagtgttccagccaccggcccagggcaatgaacacaaagagcatggggggcgtgtcgaagaatgtcacagggctcctctccgctttctc

SEQ ID NO: 6526 - RNA, 96 nt, synthetic construct
  source 1..96: mol_type = other RNA
ctttgccaagtgttccagccaccggcccagggcaatgaacacaaagagcatggggggcgtgtcgaagaatgtcacagggctcctctccgccttctc

SEQ ID NO: 6527 - RNA, 96 nt, synthetic construct
  source 1..96: mol_type = other RNA
ctttgccaagtgttccagccaccggcccagggcaatgaacacaaagagcatggggggcgtgtcgaagaatgtcacagggctcctctccgctttctc

SEQ ID NO: 6528 - RNA, 97 nt, synthetic construct
  source 1..97: mol_type = other RNA
cctttgccaagtgttccagccaccggcccagggcaatgaacacaaagagcatggggggcgtgtcgaagaatgtcacagggctcctctccgccttctc

SEQ ID NO: 6529 - RNA, 97 nt, synthetic construct
  source 1..97: mol_type = other RNA
cctttgccaagtgttccagccaccggcccagggcaatgaacacaaagagcatggggggcgtgtcgaagaatgtcacagggctcctctccgctttctc

SEQ ID NO: 6530 - RNA, 98 nt, synthetic construct
  source 1..98: mol_type = other RNA
acctttgccaagtgttccagccaccggcccagggcaatgaacacaaagagcatggggggcgtgtcgaagaatgtcacagggctcctctccgccttctc

SEQ ID NO: 6531 - RNA, 98 nt, synthetic construct
  source 1..98: mol_type = other RNA
acctttgccaagtgttccagccaccggcccagggcaatgaacacaaagagcatggggggcgtgtcgaagaatgtcacagggctcctctccgctttctc

SEQ ID NO: 6532 - RNA, 99 nt, synthetic construct
  source 1..99: mol_type = other RNA
tacctttgccaagtgttccagccaccggcccagggcaatgaacacaaagagcatggggggcgtgtcgaagaatgtcacagggctcctctccgccttctc

SEQ ID NO: 6533 - RNA, 99 nt, synthetic construct
  source 1..99: mol_type = other RNA
tacctttgccaagtgttccagccaccggcccagggcaatgaacacaaagagcatggggggcgtgtcgaagaatgtcacagggctcctctccgctttctc

SEQ ID NO: 6534 - RNA, 100 nt, synthetic construct
  source 1..100: mol_type = other RNA
ttacctttgccaagtgttccagccaccggcccagggcaatgaacacaaagagcatggggggcgtgtcgaagaatgtcacagggctcctctccgctttctc

SEQ ID NO: 6535 - RNA, 100 nt, synthetic construct
  source 1..100: mol_type = other RNA
ttacctttgccaagtgttccagccaccggcccagggcaatgaacacaaagagcatggggggcgtgtcgaagaatgtcacagggctcctctccgccttctc

SEQ ID NO: 6536 - RNA, 20 nt, synthetic construct
  source 1..20: mol_type = other RNA
gggcaatgaacacaaagagc

SEQ ID NO: 6537 - RNA, 20 nt, synthetic construct
  source 1..20: mol_type = other RNA
agggctcctctccgctttct

SEQ ID NO: 6538 - RNA, 16 nt, synthetic construct
  source 1..16: mol_type = other RNA
tgtggctgagaaggcg

SEQ ID NO: 6539 - RNA, 17 nt, synthetic construct
  source 1..17: mol_type = other RNA
ctgtggctgagaaggcg

SEQ ID NO: 6540 - RNA, 18 nt, synthetic construct
  source 1..18: mol_type = other RNA
gctgtggctgagaaggcg

SEQ ID NO: 6541 - RNA, 19 nt, synthetic construct
  source 1..19: mol_type = other RNA
tgctgtggctgagaaggcg

SEQ ID NO: 6542 - RNA, 20 nt, synthetic construct
  source 1..20: mol_type = other RNA
ttgctgtggctgagaaggcg

SEQ ID NO: 6543 - RNA, 21 nt, synthetic construct
  source 1..21: mol_type = other RNA
gttgctgtggctgagaaggcg

SEQ ID NO: 6544 - RNA, 22 nt, synthetic construct
  source 1..22: mol_type = other RNA
ggttgctgtggctgagaaggcg

SEQ ID NO: 6545-6551 - skipped (7 entries)

SEQ ID NO: 6552 - RNA, 10 nt, synthetic construct
  source 1..10: mol_type = other RNA
cttctcagcc

SEQ ID NO: 6553 - RNA, 11 nt, synthetic construct
  source 1..11: mol_type = other RNA
cttctcagcca

SEQ ID NO: 6554 - RNA, 12 nt, synthetic construct
  source 1..12: mol_type = other RNA
cttctcagccac

SEQ ID NO: 6555 - RNA, 13 nt, synthetic construct
  source 1..13: mol_type = other RNA
cttctcagccaca

SEQ ID NO: 6556 - RNA, 14 nt, synthetic construct
  source 1..14: mol_type = other RNA
cttctcagccacag

SEQ ID NO: 6557 - RNA, 15 nt, synthetic construct
  source 1..15: mol_type = other RNA
cttctcagccacagc

SEQ ID NO: 6558 - RNA, 16 nt, synthetic construct
  source 1..16: mol_type = other RNA
cttctcagccacagca

SEQ ID NO: 6559 - RNA, 17 nt, synthetic construct
  source 1..17: mol_type = other RNA
cttctcagccacagcaa

SEQ ID NO: 6560 - RNA, 18 nt, synthetic construct
  source 1..18: mol_type = other RNA
cttctcagccacagcaac

SEQ ID NO: 6561 - RNA, 19 nt, synthetic construct
  source 1..19: mol_type = other RNA
cttctcagccacagcaacc

SEQ ID NO: 6562 - RNA, 68 nt, synthetic construct
  source 1..68: mol_type = other RNA
cggcccagggcaatgaacacaaagagcatggggggcgtgtcgaagaatgtcacagggctcctttccgc

SEQ ID NO: 6563 - RNA, 68 nt, synthetic construct
  source 1..68: mol_type = other RNA
cggcccagggcaatgaacacaaagagcatggggggcgtgtcgaagaatgtcacagggctcctctccgc

SEQ ID NO: 6564 - RNA, 69 nt, synthetic construct
  source 1..69: mol_type = other RNA
ccggcccagggcaatgaacacaaagagcatggggggcgtgtcgaagaatgtcacagggctcctttccgc

SEQ ID NO: 6565 - RNA, 69 nt, synthetic construct
  source 1..69: mol_type = other RNA
ccggcccagggcaatgaacacaaagagcatggggggcgtgtcgaagaatgtcacagggctcctctccgc

SEQ ID NO: 6566 - RNA, 70 nt, synthetic construct
  source 1..70: mol_type = other RNA
accggcccagggcaatgaacacaaagagcatggggggcgtgtcgaagaatgtcacagggctcctctccgc

SEQ ID NO: 6567 - RNA, 70 nt, synthetic construct
  source 1..70: mol_type = other RNA
accggcccagggcaatgaacacaaagagcatggggggcgtgtcgaagaatgtcacagggctcctttccgc

SEQ ID NO: 6568 - RNA, 71 nt, synthetic construct
  source 1..71: mol_type = other RNA
caccggcccagggcaatgaacacaaagagcatggggggcgtgtcgaagaatgtcacagggctcctctccgc

SEQ ID NO: 6569 - RNA, 71 nt, synthetic construct
  source 1..71: mol_type = other RNA
caccggcccagggcaatgaacacaaagagcatggggggcgtgtcgaagaatgtcacagggctcctttccgc

SEQ ID NO: 6570 - RNA, 72 nt, synthetic construct
  source 1..72: mol_type = other RNA
ccaccggcccagggcaatgaacacaaagagcatggggggcgtgtcgaagaatgtcacagggctcctttccgc

SEQ ID NO: 6571 - RNA, 72 nt, synthetic construct
  source 1..72: mol_type = other RNA
ccaccggcccagggcaatgaacacaaagagcatggggggcgtgtcgaagaatgtcacagggctcctctccgc

SEQ ID NO: 6572 - RNA, 73 nt, synthetic construct
  source 1..73: mol_type = other RNA
gccaccggcccagggcaatgaacacaaagagcatggggggcgtgtcgaagaatgtcacagggctcctttccgc

SEQ ID NO: 6573 - RNA, 73 nt, synthetic construct
  source 1..73: mol_type = other RNA
gccaccggcccagggcaatgaacacaaagagcatggggggcgtgtcgaagaatgtcacagggctcctctccgc

SEQ ID NO: 6574 - RNA, 74 nt, synthetic construct
  source 1..74: mol_type = other RNA
agccaccggcccagggcaatgaacacaaagagcatggggggcgtgtcgaagaatgtcacagggctcctctccgc

SEQ ID NO: 6575 - RNA, 74 nt, synthetic construct
  source 1..74: mol_type = other RNA
agccaccggcccagggcaatgaacacaaagagcatggggggcgtgtcgaagaatgtcacagggctcctttccgc

SEQ ID NO: 6576 - RNA, 75 nt, synthetic construct
  source 1..75: mol_type = other RNA
cagccaccggcccagggcaatgaacacaaagagcatggggggcgtgtcgaagaatgtcacagggctcctttccgc

SEQ ID NO: 6577 - RNA, 75 nt, synthetic construct
  source 1..75: mol_type = other RNA
cagccaccggcccagggcaatgaacacaaagagcatggggggcgtgtcgaagaatgtcacagggctcctctccgc

SEQ ID NO: 6578 - RNA, 76 nt, synthetic construct
  source 1..76: mol_type = other RNA
ccagccaccggcccagggcaatgaacacaaagagcatggggggcgtgtcgaagaatgtcacagggctcctttccgc

SEQ ID NO: 6579 - RNA, 76 nt, synthetic construct
  source 1..76: mol_type = other RNA
ccagccaccggcccagggcaatgaacacaaagagcatggggggcgtgtcgaagaatgtcacagggctcctctccgc

SEQ ID NO: 6580 - RNA, 77 nt, synthetic construct
  source 1..77: mol_type = other RNA
tccagccaccggcccagggcaatgaacacaaagagcatggggggcgtgtcgaagaatgtcacagggctcctttccgc

SEQ ID NO: 6581 - RNA, 77 nt, synthetic construct
  source 1..77: mol_type = other RNA
tccagccaccggcccagggcaatgaacacaaagagcatggggggcgtgtcgaagaatgtcacagggctcctctccgc

SEQ ID NO: 6582 - RNA, 78 nt, synthetic construct
  source 1..78: mol_type = other RNA
ttccagccaccggcccagggcaatgaacacaaagagcatggggggcgtgtcgaagaatgtcacagggctcctctccgc

SEQ ID NO: 6583 - RNA, 78 nt, synthetic construct
  source 1..78: mol_type = other RNA
ttccagccaccggcccagggcaatgaacacaaagagcatggggggcgtgtcgaagaatgtcacagggctcctttccgc

SEQ ID NO: 6584 - RNA, 79 nt, synthetic construct
  source 1..79: mol_type = other RNA
gttccagccaccggcccagggcaatgaacacaaagagcatggggggcgtgtcgaagaatgtcacagggctcctttccgc

SEQ ID NO: 6585 - RNA, 79 nt, synthetic construct
  source 1..79: mol_type = other RNA
gttccagccaccggcccagggcaatgaacacaaagagcatggggggcgtgtcgaagaatgtcacagggctcctctccgc

SEQ ID NO: 6586 - RNA, 80 nt, synthetic construct
  source 1..80: mol_type = other RNA
tgttccagccaccggcccagggcaatgaacacaaagagcatggggggcgtgtcgaagaatgtcacagggctcctttccgc

SEQ ID NO: 6587 - RNA, 80 nt, synthetic construct
  source 1..80: mol_type = other RNA
tgttccagccaccggcccagggcaatgaacacaaagagcatggggggcgtgtcgaagaatgtcacagggctcctctccgc

SEQ ID NO: 6588 - RNA, 81 nt, synthetic construct
  source 1..81: mol_type = other RNA
gtgttccagccaccggcccagggcaatgaacacaaagagcatggggggcgtgtcgaagaatgtcacagggctcctctccgc

SEQ ID NO: 6589 - RNA, 81 nt, synthetic construct
  source 1..81: mol_type = other RNA
gtgttccagccaccggcccagggcaatgaacacaaagagcatggggggcgtgtcgaagaatgtcacagggctcctttccgc

SEQ ID NO: 6590 - RNA, 82 nt, synthetic construct
  source 1..82: mol_type = other RNA
agtgttccagccaccggcccagggcaatgaacacaaagagcatggggggcgtgtcgaagaatgtcacagggctcctctccgc

SEQ ID NO: 6591 - RNA, 82 nt, synthetic construct
  source 1..82: mol_type = other RNA
agtgttccagccaccggcccagggcaatgaacacaaagagcatggggggcgtgtcgaagaatgtcacagggctcctttccgc

SEQ ID NO: 6592 - RNA, 83 nt, synthetic construct
  source 1..83: mol_type = other RNA
aagtgttccagccaccggcccagggcaatgaacacaaagagcatggggggcgtgtcgaagaatgtcacagggctcctttccgc

SEQ ID NO: 6593 - RNA, 83 nt, synthetic construct
  source 1..83: mol_type = other RNA
aagtgttccagccaccggcccagggcaatgaacacaaagagcatggggggcgtgtcgaagaatgtcacagggctcctctccgc

SEQ ID NO: 6594 - RNA, 84 nt, synthetic construct
  source 1..84: mol_type = other RNA
caagtgttccagccaccggcccagggcaatgaacacaaagagcatggggggcgtgtcgaagaatgtcacagggctcctttccgc

SEQ ID NO: 6595 - RNA, 84 nt, synthetic construct
  source 1..84: mol_type = other RNA
caagtgttccagccaccggcccagggcaatgaacacaaagagcatggggggcgtgtcgaagaatgtcacagggctcctctccgc

SEQ ID NO: 6596 - RNA, 85 nt, synthetic construct
  source 1..85: mol_type = other RNA
ccaagtgttccagccaccggcccagggcaatgaacacaaagagcatggggggcgtgtcgaagaatgtcacagggctcctttccgc

SEQ ID NO: 6597 - RNA, 85 nt, synthetic construct
  source 1..85: mol_type = other RNA
ccaagtgttccagccaccggcccagggcaatgaacacaaagagcatggggggcgtgtcgaagaatgtcacagggctcctctccgc

SEQ ID NO: 6598 - RNA, 86 nt, synthetic construct
  source 1..86: mol_type = other RNA
gccaagtgttccagccaccggcccagggcaatgaacacaaagagcatggggggcgtgtcgaagaatgtcacagggctcctttccgc

SEQ ID NO: 6599 - RNA, 86 nt, synthetic construct
  source 1..86: mol_type = other RNA
gccaagtgttccagccaccggcccagggcaatgaacacaaagagcatggggggcgtgtcgaagaatgtcacagggctcctctccgc

SEQ ID NO: 6600 - RNA, 87 nt, synthetic construct
  source 1..87: mol_type = other RNA
tgccaagtgttccagccaccggcccagggcaatgaacacaaagagcatggggggcgtgtcgaagaatgtcacagggctcctctccgc

SEQ ID NO: 6601 - RNA, 87 nt, synthetic construct
  source 1..87: mol_type = other RNA
tgccaagtgttccagccaccggcccagggcaatgaacacaaagagcatggggggcgtgtcgaagaatgtcacagggctcctttccgc

SEQ ID NO: 6602 - RNA, 88 nt, synthetic construct
  source 1..88: mol_type = other RNA
ttgccaagtgttccagccaccggcccagggcaatgaacacaaagagcatggggggcgtgtcgaagaatgtcacagggctcctttccgc

SEQ ID NO: 6603 - RNA, 88 nt, synthetic construct
  source 1..88: mol_type = other RNA
ttgccaagtgttccagccaccggcccagggcaatgaacacaaagagcatggggggcgtgtcgaagaatgtcacagggctcctctccgc

SEQ ID NO: 6604 - RNA, 89 nt, synthetic construct
  source 1..89: mol_type = other RNA
tttgccaagtgttccagccaccggcccagggcaatgaacacaaagagcatggggggcgtgtcgaagaatgtcacagggctcctttccgc

SEQ ID NO: 6605 - RNA, 89 nt, synthetic construct
  source 1..89: mol_type = other RNA
tttgccaagtgttccagccaccggcccagggcaatgaacacaaagagcatggggggcgtgtcgaagaatgtcacagggctcctctccgc

SEQ ID NO: 6606 - RNA, 90 nt, synthetic construct
  source 1..90: mol_type = other RNA
ctttgccaagtgttccagccaccggcccagggcaatgaacacaaagagcatggggggcgtgtcgaagaatgtcacagggctcctttccgc

SEQ ID NO: 6607 - RNA, 90 nt, synthetic construct
  source 1..90: mol_type = other RNA
ctttgccaagtgttccagccaccggcccagggcaatgaacacaaagagcatggggggcgtgtcgaagaatgtcacagggctcctctccgc

SEQ ID NO: 6608 - RNA, 91 nt, synthetic construct
  source 1..91: mol_type = other RNA
cctttgccaagtgttccagccaccggcccagggcaatgaacacaaagagcatggggggcgtgtcgaagaatgtcacagggctcctttccgc

SEQ ID NO: 6609 - RNA, 91 nt, synthetic construct
  source 1..91: mol_type = other RNA
cctttgccaagtgttccagccaccggcccagggcaatgaacacaaagagcatggggggcgtgtcgaagaatgtcacagggctcctctccgc

SEQ ID NO: 6610 - RNA, 92 nt, synthetic construct
  source 1..92: mol_type = other RNA
acctttgccaagtgttccagccaccggcccagggcaatgaacacaaagagcatggggggcgtgtcgaagaatgtcacagggctcctctccgc

SEQ ID NO: 6611 - RNA, 92 nt, synthetic construct
  source 1..92: mol_type = other RNA
acctttgccaagtgttccagccaccggcccagggcaatgaacacaaagagcatggggggcgtgtcgaagaatgtcacagggctcctttccgc

SEQ ID NO: 6612 - RNA, 93 nt, synthetic construct
  source 1..93: mol_type = other RNA
tacctttgccaagtgttccagccaccggcccagggcaatgaacacaaagagcatggggggcgtgtcgaagaatgtcacagggctcctctccgc

SEQ ID NO: 6613 - RNA, 93 nt, synthetic construct
  source 1..93: mol_type = other RNA
tacctttgccaagtgttccagccaccggcccagggcaatgaacacaaagagcatggggggcgtgtcgaagaatgtcacagggctcctttccgc

SEQ ID NO: 6614 - RNA, 94 nt, synthetic construct
  source 1..94: mol_type = other RNA
ttacctttgccaagtgttccagccaccggcccagggcaatgaacacaaagagcatggggggcgtgtcgaagaatgtcacagggctcctttccgc

SEQ ID NO: 6615 - RNA, 94 nt, synthetic construct
  source 1..94: mol_type = other RNA
ttacctttgccaagtgttccagccaccggcccagggcaatgaacacaaagagcatggggggcgtgtcgaagaatgtcacagggctcctctccgc

SEQ ID NO: 6616 - RNA, 95 nt, synthetic construct
  source 1..95: mol_type = other RNA
gttacctttgccaagtgttccagccaccggcccagggcaatgaacacaaagagcatggggggcgtgtcgaagaatgtcacagggctcctctccgc

SEQ ID NO: 6617 - RNA, 95 nt, synthetic construct
  source 1..95: mol_type = other RNA
gttacctttgccaagtgttccagccaccggcccagggcaatgaacacaaagagcatggggggcgtgtcgaagaatgtcacagggctcctttccgc

SEQ ID NO: 6618 - RNA, 96 nt, synthetic construct
  source 1..96: mol_type = other RNA
tgttacctttgccaagtgttccagccaccggcccagggcaatgaacacaaagagcatggggggcgtgtcgaagaatgtcacagggctcctctccgc

SEQ ID NO: 6619 - RNA, 96 nt, synthetic construct
  source 1..96: mol_type = other RNA
tgttacctttgccaagtgttccagccaccggcccagggcaatgaacacaaagagcatggggggcgtgtcgaagaatgtcacagggctcctttccgc

SEQ ID NO: 6620 - RNA, 97 nt, synthetic construct
  source 1..97: mol_type = other RNA
ctgttacctttgccaagtgttccagccaccggcccagggcaatgaacacaaagagcatggggggcgtgtcgaagaatgtcacagggctcctttccgc

SEQ ID NO: 6621 - RNA, 97 nt, synthetic construct
  source 1..97: mol_type = other RNA
ctgttacctttgccaagtgttccagccaccggcccagggcaatgaacacaaagagcatggggggcgtgtcgaagaatgtcacagggctcctctccgc

SEQ ID NO: 6622 - RNA, 98 nt, synthetic construct
  source 1..98: mol_type = other RNA
gctgttacctttgccaagtgttccagccaccggcccagggcaatgaacacaaagagcatggggggcgtgtcgaagaatgtcacagggctcctttccgc

SEQ ID NO: 6623 - RNA, 98 nt, synthetic construct
  source 1..98: mol_type = other RNA
gctgttacctttgccaagtgttccagccaccggcccagggcaatgaacacaaagagcatggggggcgtgtcgaagaatgtcacagggctcctctccgc

SEQ ID NO: 6624 - RNA, 99 nt, synthetic construct
  source 1..99: mol_type = other RNA
tgctgttacctttgccaagtgttccagccaccggcccagggcaatgaacacaaagagcatggggggcgtgtcgaagaatgtcacagggctcctctccgc

SEQ ID NO: 6625 - RNA, 99 nt, synthetic construct
  source 1..99: mol_type = other RNA
tgctgttacctttgccaagtgttccagccaccggcccagggcaatgaacacaaagagcatggggggcgtgtcgaagaatgtcacagggctcctttccgc

SEQ ID NO: 6626 - RNA, 100 nt, synthetic construct
  source 1..100: mol_type = other RNA
ctgctgttacctttgccaagtgttccagccaccggcccagggcaatgaacacaaagagcatggggggcgtgtcgaagaatgtcacagggctcctctccgc

SEQ ID NO: 6627 - RNA, 100 nt, synthetic construct
  source 1..100: mol_type = other RNA
ctgctgttacctttgccaagtgttccagccaccggcccagggcaatgaacacaaagagcatggggggcgtgtcgaagaatgtcacagggctcctttccgc

SEQ ID NO: 6628 - RNA, 16 nt, synthetic construct
  source 1..16: mol_type = other RNA
tggctgagaaggcgga

SEQ ID NO: 6629 - RNA, 17 nt, synthetic construct
  source 1..17: mol_type = other RNA
gtggctgagaaggcgga

SEQ ID NO: 6630 - RNA, 18 nt, synthetic construct
  source 1..18: mol_type = other RNA
tgtggctgagaaggcgga

SEQ ID NO: 6631 - RNA, 19 nt, synthetic construct
  source 1..19: mol_type = other RNA
ctgtggctgagaaggcgga

SEQ ID NO: 6632 - RNA, 20 nt, synthetic construct
  source 1..20: mol_type = other RNA
gctgtggctgagaaggcgga

SEQ ID NO: 6633 - RNA, 21 nt, synthetic construct
  source 1..21: mol_type = other RNA
tgctgtggctgagaaggcgga

SEQ ID NO: 6634 - RNA, 22 nt, synthetic construct
  source 1..22: mol_type = other RNA
ttgctgtggctgagaaggcgga

SEQ ID NO: 6635-6640 - skipped (6 entries)

SEQ ID NO: 6641 - RNA, 10 nt, synthetic construct
  source 1..10: mol_type = other RNA
gccttctcag

SEQ ID NO: 6642 - RNA, 11 nt, synthetic construct
  source 1..11: mol_type = other RNA
gccttctcagc

SEQ ID NO: 6643 - RNA, 12 nt, synthetic construct
  source 1..12: mol_type = other RNA
gccttctcagcc

SEQ ID NO: 6644 - RNA, 13 nt, synthetic construct
  source 1..13: mol_type = other RNA
gccttctcagcca

SEQ ID NO: 6645 - RNA, 14 nt, synthetic construct
  source 1..14: mol_type = other RNA
gccttctcagccac

SEQ ID NO: 6646 - RNA, 15 nt, synthetic construct
  source 1..15: mol_type = other RNA
gccttctcagccaca

SEQ ID NO: 6647 - RNA, 16 nt, synthetic construct
  source 1..16: mol_type = other RNA
gccttctcagccacag

SEQ ID NO: 6648 - RNA, 17 nt, synthetic construct
  source 1..17: mol_type = other RNA
gccttctcagccacagc

SEQ ID NO: 6649 - RNA, 18 nt, synthetic construct
  source 1..18: mol_type = other RNA
gccttctcagccacagca

SEQ ID NO: 6650 - RNA, 19 nt, synthetic construct
  source 1..19: mol_type = other RNA
gccttctcagccacagcaa

SEQ ID NO: 6651 - RNA, 66 nt, synthetic construct
  source 1..66: mol_type = other RNA
cggcccagggcaatgaacacaaagagcatggggggcgtgtcgaagaatgtcacagggctcctctcc

SEQ ID NO: 6652 - RNA, 66 nt, synthetic construct
  source 1..66: mol_type = other RNA
cggcccagggcaatgaacacaaagagcatggggggcgtgtcgaagaatgtcacagggctccgctcc

SEQ ID NO: 6653 - RNA, 66 nt, synthetic construct
  source 1..66: mol_type = other RNA
cggcccagggcaatgaacacaaagagcatggggggcgtgtcgaagaatgtcacagggcttctctcc

SEQ ID NO: 6654 - RNA, 66 nt, synthetic construct
  source 1..66: mol_type = other RNA
cggcccagggcaatgaacacaaagagcatggggggcgtgtcgaagaatgtcacagggcttcgctcc

SEQ ID NO: 6655 - RNA, 66 nt, synthetic construct
  source 1..66: mol_type = other RNA
cggcccagggcaatgaacacaaagagcatggggggcgtgtcgaagaatgtcacagggctacgctcc

SEQ ID NO: 6656 - RNA, 66 nt, synthetic construct
  source 1..66: mol_type = other RNA
cggcccagggcaatgaacacaaagagcatggggggcgtgtcgaagaatgtcacagggctgcgctcc

SEQ ID NO: 6657 - RNA, 67 nt, synthetic construct
  source 1..67: mol_type = other RNA
ccggcccagggcaatgaacacaaagagcatggggggcgtgtcgaagaatgtcacagggctcctctcc

SEQ ID NO: 6658 - RNA, 67 nt, synthetic construct
  source 1..67: mol_type = other RNA
ccggcccagggcaatgaacacaaagagcatggggggcgtgtcgaagaatgtcacagggcttctctcc

SEQ ID NO: 6659 - RNA, 67 nt, synthetic construct
  source 1..67: mol_type = other RNA
ccggcccagggcaatgaacacaaagagcatggggggcgtgtcgaagaatgtcacagggctccgctcc

SEQ ID NO: 6660 - RNA, 67 nt, synthetic construct
  source 1..67: mol_type = other RNA
ccggcccagggcaatgaacacaaagagcatggggggcgtgtcgaagaatgtcacagggctgcgctcc

SEQ ID NO: 6661 - RNA, 67 nt, synthetic construct
  source 1..67: mol_type = other RNA
ccggcccagggcaatgaacacaaagagcatggggggcgtgtcgaagaatgtcacagggcttcgctcc

SEQ ID NO: 6662 - RNA, 67 nt, synthetic construct
  source 1..67: mol_type = other RNA
ccggcccagggcaatgaacacaaagagcatggggggcgtgtcgaagaatgtcacagggctacgctcc

SEQ ID NO: 6663 - RNA, 68 nt, synthetic construct
  source 1..68: mol_type = other RNA
accggcccagggcaatgaacacaaagagcatggggggcgtgtcgaagaatgtcacagggctcctctcc

SEQ ID NO: 6664 - RNA, 68 nt, synthetic construct
  source 1..68: mol_type = other RNA
accggcccagggcaatgaacacaaagagcatggggggcgtgtcgaagaatgtcacagggcttctctcc

SEQ ID NO: 6665 - RNA, 68 nt, synthetic construct
  source 1..68: mol_type = other RNA
accggcccagggcaatgaacacaaagagcatggggggcgtgtcgaagaatgtcacagggctccgctcc

SEQ ID NO: 6666 - RNA, 68 nt, synthetic construct
  source 1..68: mol_type = other RNA
accggcccagggcaatgaacacaaagagcatggggggcgtgtcgaagaatgtcacagggcttcgctcc

SEQ ID NO: 6667 - RNA, 68 nt, synthetic construct
  source 1..68: mol_type = other RNA
accggcccagggcaatgaacacaaagagcatggggggcgtgtcgaagaatgtcacagggctacgctcc

SEQ ID NO: 6668 - RNA, 68 nt, synthetic construct
  source 1..68: mol_type = other RNA
accggcccagggcaatgaacacaaagagcatggggggcgtgtcgaagaatgtcacagggctgcgctcc

SEQ ID NO: 6669 - RNA, 69 nt, synthetic construct
  source 1..69: mol_type = other RNA
caccggcccagggcaatgaacacaaagagcatggggggcgtgtcgaagaatgtcacagggcttctctcc

SEQ ID NO: 6670 - RNA, 69 nt, synthetic construct
  source 1..69: mol_type = other RNA
caccggcccagggcaatgaacacaaagagcatggggggcgtgtcgaagaatgtcacagggctacgctcc

SEQ ID NO: 6671 - RNA, 69 nt, synthetic construct
  source 1..69: mol_type = other RNA
caccggcccagggcaatgaacacaaagagcatggggggcgtgtcgaagaatgtcacagggctccgctcc

SEQ ID NO: 6672 - RNA, 69 nt, synthetic construct
  source 1..69: mol_type = other RNA
caccggcccagggcaatgaacacaaagagcatggggggcgtgtcgaagaatgtcacagggctgcgctcc

SEQ ID NO: 6673 - RNA, 69 nt, synthetic construct
  source 1..69: mol_type = other RNA
caccggcccagggcaatgaacacaaagagcatggggggcgtgtcgaagaatgtcacagggcttcgctcc

SEQ ID NO: 6674 - RNA, 69 nt, synthetic construct
  source 1..69: mol_type = other RNA
caccggcccagggcaatgaacacaaagagcatggggggcgtgtcgaagaatgtcacagggctcctctcc

SEQ ID NO: 6675 - RNA, 70 nt, synthetic construct
  source 1..70: mol_type = other RNA
ccaccggcccagggcaatgaacacaaagagcatggggggcgtgtcgaagaatgtcacagggcttcgctcc

SEQ ID NO: 6676 - RNA, 70 nt, synthetic construct
  source 1..70: mol_type = other RNA
ccaccggcccagggcaatgaacacaaagagcatggggggcgtgtcgaagaatgtcacagggctcctctcc

SEQ ID NO: 6677 - RNA, 70 nt, synthetic construct
  source 1..70: mol_type = other RNA
ccaccggcccagggcaatgaacacaaagagcatggggggcgtgtcgaagaatgtcacagggctacgctcc

SEQ ID NO: 6678 - RNA, 70 nt, synthetic construct
  source 1..70: mol_type = other RNA
ccaccggcccagggcaatgaacacaaagagcatggggggcgtgtcgaagaatgtcacagggcttctctcc

SEQ ID NO: 6679 - RNA, 70 nt, synthetic construct
  source 1..70: mol_type = other RNA
ccaccggcccagggcaatgaacacaaagagcatggggggcgtgtcgaagaatgtcacagggctccgctcc

SEQ ID NO: 6680 - RNA, 70 nt, synthetic construct
  source 1..70: mol_type = other RNA
ccaccggcccagggcaatgaacacaaagagcatggggggcgtgtcgaagaatgtcacagggctgcgctcc

SEQ ID NO: 6681 - RNA, 71 nt, synthetic construct
  source 1..71: mol_type = other RNA
gccaccggcccagggcaatgaacacaaagagcatggggggcgtgtcgaagaatgtcacagggctcctctcc

SEQ ID NO: 6682 - RNA, 71 nt, synthetic construct
  source 1..71: mol_type = other RNA
gccaccggcccagggcaatgaacacaaagagcatggggggcgtgtcgaagaatgtcacagggcttctctcc

SEQ ID NO: 6683 - RNA, 71 nt, synthetic construct
  source 1..71: mol_type = other RNA
gccaccggcccagggcaatgaacacaaagagcatggggggcgtgtcgaagaatgtcacagggctccgctcc

SEQ ID NO: 6684 - RNA, 71 nt, synthetic construct
  source 1..71: mol_type = other RNA
gccaccggcccagggcaatgaacacaaagagcatggggggcgtgtcgaagaatgtcacagggcttcgctcc

SEQ ID NO: 6685 - RNA, 71 nt, synthetic construct
  source 1..71: mol_type = other RNA
gccaccggcccagggcaatgaacacaaagagcatggggggcgtgtcgaagaatgtcacagggctacgctcc

SEQ ID NO: 6686 - RNA, 71 nt, synthetic construct
  source 1..71: mol_type = other RNA
gccaccggcccagggcaatgaacacaaagagcatggggggcgtgtcgaagaatgtcacagggctgcgctcc

SEQ ID NO: 6687 - RNA, 72 nt, synthetic construct
  source 1..72: mol_type = other RNA
agccaccggcccagggcaatgaacacaaagagcatggggggcgtgtcgaagaatgtcacagggcttcgctcc

SEQ ID NO: 6688 - RNA, 72 nt, synthetic construct
  source 1..72: mol_type = other RNA
agccaccggcccagggcaatgaacacaaagagcatggggggcgtgtcgaagaatgtcacagggcttctctcc

SEQ ID NO: 6689 - RNA, 72 nt, synthetic construct
  source 1..72: mol_type = other RNA
agccaccggcccagggcaatgaacacaaagagcatggggggcgtgtcgaagaatgtcacagggctccgctcc

SEQ ID NO: 6690 - RNA, 72 nt, synthetic construct
  source 1..72: mol_type = other RNA
agccaccggcccagggcaatgaacacaaagagcatggggggcgtgtcgaagaatgtcacagggctgcgctcc

SEQ ID NO: 6691 - RNA, 72 nt, synthetic construct
  source 1..72: mol_type = other RNA
agccaccggcccagggcaatgaacacaaagagcatggggggcgtgtcgaagaatgtcacagggctacgctcc

SEQ ID NO: 6692 - RNA, 72 nt, synthetic construct
  source 1..72: mol_type = other RNA
agccaccggcccagggcaatgaacacaaagagcatggggggcgtgtcgaagaatgtcacagggctcctctcc

SEQ ID NO: 6693 - RNA, 73 nt, synthetic construct
  source 1..73: mol_type = other RNA
cagccaccggcccagggcaatgaacacaaagagcatggggggcgtgtcgaagaatgtcacagggcttcgctcc

SEQ ID NO: 6694 - RNA, 73 nt, synthetic construct
  source 1..73: mol_type = other RNA
cagccaccggcccagggcaatgaacacaaagagcatggggggcgtgtcgaagaatgtcacagggctccgctcc

SEQ ID NO: 6695 - RNA, 73 nt, synthetic construct
  source 1..73: mol_type = other RNA
cagccaccggcccagggcaatgaacacaaagagcatggggggcgtgtcgaagaatgtcacagggctcctctcc

SEQ ID NO: 6696 - RNA, 73 nt, synthetic construct
  source 1..73: mol_type = other RNA
cagccaccggcccagggcaatgaacacaaagagcatggggggcgtgtcgaagaatgtcacagggctgcgctcc

SEQ ID NO: 6697 - RNA, 73 nt, synthetic construct
  source 1..73: mol_type = other RNA
cagccaccggcccagggcaatgaacacaaagagcatggggggcgtgtcgaagaatgtcacagggctacgctcc

SEQ ID NO: 6698 - RNA, 73 nt, synthetic construct
  source 1..73: mol_type = other RNA
cagccaccggcccagggcaatgaacacaaagagcatggggggcgtgtcgaagaatgtcacagggcttctctcc

SEQ ID NO: 6699 - RNA, 74 nt, synthetic construct
  source 1..74: mol_type = other RNA
ccagccaccggcccagggcaatgaacacaaagagcatggggggcgtgtcgaagaatgtcacagggctacgctcc

SEQ ID NO: 6700 - RNA, 74 nt, synthetic construct
  source 1..74: mol_type = other RNA
ccagccaccggcccagggcaatgaacacaaagagcatggggggcgtgtcgaagaatgtcacagggcttcgctcc

SEQ ID NO: 6701 - RNA, 74 nt, synthetic construct
  source 1..74: mol_type = other RNA
ccagccaccggcccagggcaatgaacacaaagagcatggggggcgtgtcgaagaatgtcacagggcttctctcc

SEQ ID NO: 6702 - RNA, 74 nt, synthetic construct
  source 1..74: mol_type = other RNA
ccagccaccggcccagggcaatgaacacaaagagcatggggggcgtgtcgaagaatgtcacagggctgcgctcc

SEQ ID NO: 6703 - RNA, 74 nt, synthetic construct
  source 1..74: mol_type = other RNA
ccagccaccggcccagggcaatgaacacaaagagcatggggggcgtgtcgaagaatgtcacagggctcctctcc

SEQ ID NO: 6704 - RNA, 74 nt, synthetic construct
  source 1..74: mol_type = other RNA
ccagccaccggcccagggcaatgaacacaaagagcatggggggcgtgtcgaagaatgtcacagggctccgctcc

SEQ ID NO: 6705 - RNA, 75 nt, synthetic construct
  source 1..75: mol_type = other RNA
tccagccaccggcccagggcaatgaacacaaagagcatggggggcgtgtcgaagaatgtcacagggctccgctcc

SEQ ID NO: 6706 - RNA, 75 nt, synthetic construct
  source 1..75: mol_type = other RNA
tccagccaccggcccagggcaatgaacacaaagagcatggggggcgtgtcgaagaatgtcacagggcttcgctcc

SEQ ID NO: 6707 - RNA, 75 nt, synthetic construct
  source 1..75: mol_type = other RNA
tccagccaccggcccagggcaatgaacacaaagagcatggggggcgtgtcgaagaatgtcacagggcttctctcc

SEQ ID NO: 6708 - RNA, 75 nt, synthetic construct
  source 1..75: mol_type = other RNA
tccagccaccggcccagggcaatgaacacaaagagcatggggggcgtgtcgaagaatgtcacagggctacgctcc

SEQ ID NO: 6709 - RNA, 75 nt, synthetic construct
  source 1..75: mol_type = other RNA
tccagccaccggcccagggcaatgaacacaaagagcatggggggcgtgtcgaagaatgtcacagggctgcgctcc

SEQ ID NO: 6710 - RNA, 75 nt, synthetic construct
  source 1..75: mol_type = other RNA
tccagccaccggcccagggcaatgaacacaaagagcatggggggcgtgtcgaagaatgtcacagggctcctctcc

SEQ ID NO: 6711 - RNA, 76 nt, synthetic construct
  source 1..76: mol_type = other RNA
ttccagccaccggcccagggcaatgaacacaaagagcatggggggcgtgtcgaagaatgtcacagggcttctctcc

SEQ ID NO: 6712 - RNA, 76 nt, synthetic construct
  source 1..76: mol_type = other RNA
ttccagccaccggcccagggcaatgaacacaaagagcatggggggcgtgtcgaagaatgtcacagggctacgctcc

SEQ ID NO: 6713 - RNA, 76 nt, synthetic construct
  source 1..76: mol_type = other RNA
ttccagccaccggcccagggcaatgaacacaaagagcatggggggcgtgtcgaagaatgtcacagggctcctctcc

SEQ ID NO: 6714 - RNA, 76 nt, synthetic construct
  source 1..76: mol_type = other RNA
ttccagccaccggcccagggcaatgaacacaaagagcatggggggcgtgtcgaagaatgtcacagggcttcgctcc

SEQ ID NO: 6715 - RNA, 76 nt, synthetic construct
  source 1..76: mol_type = other RNA
ttccagccaccggcccagggcaatgaacacaaagagcatggggggcgtgtcgaagaatgtcacagggctgcgctcc

SEQ ID NO: 6716 - RNA, 76 nt, synthetic construct
  source 1..76: mol_type = other RNA
ttccagccaccggcccagggcaatgaacacaaagagcatggggggcgtgtcgaagaatgtcacagggctccgctcc

SEQ ID NO: 6717 - RNA, 77 nt, synthetic construct
  source 1..77: mol_type = other RNA
gttccagccaccggcccagggcaatgaacacaaagagcatggggggcgtgtcgaagaatgtcacagggctgcgctcc

SEQ ID NO: 6718 - RNA, 77 nt, synthetic construct
  source 1..77: mol_type = other RNA
gttccagccaccggcccagggcaatgaacacaaagagcatggggggcgtgtcgaagaatgtcacagggctacgctcc

SEQ ID NO: 6719 - RNA, 77 nt, synthetic construct
  source 1..77: mol_type = other RNA
gttccagccaccggcccagggcaatgaacacaaagagcatggggggcgtgtcgaagaatgtcacagggcttctctcc

SEQ ID NO: 6720 - RNA, 77 nt, synthetic construct
  source 1..77: mol_type = other RNA
gttccagccaccggcccagggcaatgaacacaaagagcatggggggcgtgtcgaagaatgtcacagggctcctctcc

SEQ ID NO: 6721 - RNA, 77 nt, synthetic construct
  source 1..77: mol_type = other RNA
gttccagccaccggcccagggcaatgaacacaaagagcatggggggcgtgtcgaagaatgtcacagggcttcgctcc

SEQ ID NO: 6722 - RNA, 77 nt, synthetic construct
  source 1..77: mol_type = other RNA
gttccagccaccggcccagggcaatgaacacaaagagcatggggggcgtgtcgaagaatgtcacagggctccgctcc

SEQ ID NO: 6723 - RNA, 78 nt, synthetic construct
  source 1..78: mol_type = other RNA
tgttccagccaccggcccagggcaatgaacacaaagagcatggggggcgtgtcgaagaatgtcacagggctccgctcc

SEQ ID NO: 6724 - RNA, 78 nt, synthetic construct
  source 1..78: mol_type = other RNA
tgttccagccaccggcccagggcaatgaacacaaagagcatggggggcgtgtcgaagaatgtcacagggcttctctcc

SEQ ID NO: 6725 - RNA, 78 nt, synthetic construct
  source 1..78: mol_type = other RNA
tgttccagccaccggcccagggcaatgaacacaaagagcatggggggcgtgtcgaagaatgtcacagggctgcgctcc

SEQ ID NO: 6726 - RNA, 78 nt, synthetic construct
  source 1..78: mol_type = other RNA
tgttccagccaccggcccagggcaatgaacacaaagagcatggggggcgtgtcgaagaatgtcacagggctacgctcc

SEQ ID NO: 6727 - RNA, 78 nt, synthetic construct
  source 1..78: mol_type = other RNA
tgttccagccaccggcccagggcaatgaacacaaagagcatggggggcgtgtcgaagaatgtcacagggctcctctcc

SEQ ID NO: 6728 - RNA, 78 nt, synthetic construct
  source 1..78: mol_type = other RNA
tgttccagccaccggcccagggcaatgaacacaaagagcatggggggcgtgtcgaagaatgtcacagggcttcgctcc

SEQ ID NO: 6729 - RNA, 79 nt, synthetic construct
  source 1..79: mol_type = other RNA
gtgttccagccaccggcccagggcaatgaacacaaagagcatggggggcgtgtcgaagaatgtcacagggcttctctcc

SEQ ID NO: 6730 - RNA, 79 nt, synthetic construct
  source 1..79: mol_type = other RNA
gtgttccagccaccggcccagggcaatgaacacaaagagcatggggggcgtgtcgaagaatgtcacagggctccgctcc

SEQ ID NO: 6731 - RNA, 79 nt, synthetic construct
  source 1..79: mol_type = other RNA
gtgttccagccaccggcccagggcaatgaacacaaagagcatggggggcgtgtcgaagaatgtcacagggctcctctcc

SEQ ID NO: 6732 - RNA, 79 nt, synthetic construct
  source 1..79: mol_type = other RNA
gtgttccagccaccggcccagggcaatgaacacaaagagcatggggggcgtgtcgaagaatgtcacagggcttcgctcc

SEQ ID NO: 6733 - RNA, 79 nt, synthetic construct
  source 1..79: mol_type = other RNA
gtgttccagccaccggcccagggcaatgaacacaaagagcatggggggcgtgtcgaagaatgtcacagggctacgctcc

SEQ ID NO: 6734 - RNA, 79 nt, synthetic construct
  source 1..79: mol_type = other RNA
gtgttccagccaccggcccagggcaatgaacacaaagagcatggggggcgtgtcgaagaatgtcacagggctgcgctcc

SEQ ID NO: 6735 - RNA, 80 nt, synthetic construct
  source 1..80: mol_type = other RNA
agtgttccagccaccggcccagggcaatgaacacaaagagcatggggggcgtgtcgaagaatgtcacagggcttcgctcc

SEQ ID NO: 6736 - RNA, 80 nt, synthetic construct
  source 1..80: mol_type = other RNA
agtgttccagccaccggcccagggcaatgaacacaaagagcatggggggcgtgtcgaagaatgtcacagggctgcgctcc

SEQ ID NO: 6737 - RNA, 80 nt, synthetic construct
  source 1..80: mol_type = other RNA
agtgttccagccaccggcccagggcaatgaacacaaagagcatggggggcgtgtcgaagaatgtcacagggctacgctcc

SEQ ID NO: 6738 - RNA, 80 nt, synthetic construct
  source 1..80: mol_type = other RNA
agtgttccagccaccggcccagggcaatgaacacaaagagcatggggggcgtgtcgaagaatgtcacagggctcctctcc

SEQ ID NO: 6739 - RNA, 80 nt, synthetic construct
  source 1..80: mol_type = other RNA
agtgttccagccaccggcccagggcaatgaacacaaagagcatggggggcgtgtcgaagaatgtcacagggcttctctcc

SEQ ID NO: 6740 - RNA, 80 nt, synthetic construct
  source 1..80: mol_type = other RNA
agtgttccagccaccggcccagggcaatgaacacaaagagcatggggggcgtgtcgaagaatgtcacagggctccgctcc

SEQ ID NO: 6741 - RNA, 81 nt, synthetic construct
  source 1..81: mol_type = other RNA
aagtgttccagccaccggcccagggcaatgaacacaaagagcatggggggcgtgtcgaagaatgtcacagggctccgctcc

SEQ ID NO: 6742 - RNA, 81 nt, synthetic construct
  source 1..81: mol_type = other RNA
aagtgttccagccaccggcccagggcaatgaacacaaagagcatggggggcgtgtcgaagaatgtcacagggcttcgctcc

SEQ ID NO: 6743 - RNA, 81 nt, synthetic construct
  source 1..81: mol_type = other RNA
aagtgttccagccaccggcccagggcaatgaacacaaagagcatggggggcgtgtcgaagaatgtcacagggcttctctcc

SEQ ID NO: 6744 - RNA, 81 nt, synthetic construct
  source 1..81: mol_type = other RNA
aagtgttccagccaccggcccagggcaatgaacacaaagagcatggggggcgtgtcgaagaatgtcacagggctcctctcc

SEQ ID NO: 6745 - RNA, 81 nt, synthetic construct
  source 1..81: mol_type = other RNA
aagtgttccagccaccggcccagggcaatgaacacaaagagcatggggggcgtgtcgaagaatgtcacagggctacgctcc

SEQ ID NO: 6746 - RNA, 81 nt, synthetic construct
  source 1..81: mol_type = other RNA
aagtgttccagccaccggcccagggcaatgaacacaaagagcatggggggcgtgtcgaagaatgtcacagggctgcgctcc

SEQ ID NO: 6747 - RNA, 82 nt, synthetic construct
  source 1..82: mol_type = other RNA
caagtgttccagccaccggcccagggcaatgaacacaaagagcatggggggcgtgtcgaagaatgtcacagggctacgctcc

SEQ ID NO: 6748 - RNA, 82 nt, synthetic construct
  source 1..82: mol_type = other RNA
caagtgttccagccaccggcccagggcaatgaacacaaagagcatggggggcgtgtcgaagaatgtcacagggctccgctcc

SEQ ID NO: 6749 - RNA, 82 nt, synthetic construct
  source 1..82: mol_type = other RNA
caagtgttccagccaccggcccagggcaatgaacacaaagagcatggggggcgtgtcgaagaatgtcacagggctgcgctcc

SEQ ID NO: 6750 - RNA, 82 nt, synthetic construct
  source 1..82: mol_type = other RNA
caagtgttccagccaccggcccagggcaatgaacacaaagagcatggggggcgtgtcgaagaatgtcacagggctcctctcc

SEQ ID NO: 6751 - RNA, 82 nt, synthetic construct
  source 1..82: mol_type = other RNA
caagtgttccagccaccggcccagggcaatgaacacaaagagcatggggggcgtgtcgaagaatgtcacagggcttcgctcc

SEQ ID NO: 6752 - RNA, 82 nt, synthetic construct
  source 1..82: mol_type = other RNA
caagtgttccagccaccggcccagggcaatgaacacaaagagcatggggggcgtgtcgaagaatgtcacagggcttctctcc

SEQ ID NO: 6753 - RNA, 83 nt, synthetic construct
  source 1..83: mol_type = other RNA
ccaagtgttccagccaccggcccagggcaatgaacacaaagagcatggggggcgtgtcgaagaatgtcacagggcttcgctcc

SEQ ID NO: 6754 - RNA, 83 nt, synthetic construct
  source 1..83: mol_type = other RNA
ccaagtgttccagccaccggcccagggcaatgaacacaaagagcatggggggcgtgtcgaagaatgtcacagggctgcgctcc

SEQ ID NO: 6755 - RNA, 83 nt, synthetic construct
  source 1..83: mol_type = other RNA
ccaagtgttccagccaccggcccagggcaatgaacacaaagagcatggggggcgtgtcgaagaatgtcacagggctccgctcc

SEQ ID NO: 6756 - RNA, 83 nt, synthetic construct
  source 1..83: mol_type = other RNA
ccaagtgttccagccaccggcccagggcaatgaacacaaagagcatggggggcgtgtcgaagaatgtcacagggctacgctcc

SEQ ID NO: 6757 - RNA, 83 nt, synthetic construct
  source 1..83: mol_type = other RNA
ccaagtgttccagccaccggcccagggcaatgaacacaaagagcatggggggcgtgtcgaagaatgtcacagggcttctctcc

SEQ ID NO: 6758 - RNA, 83 nt, synthetic construct
  source 1..83: mol_type = other RNA
ccaagtgttccagccaccggcccagggcaatgaacacaaagagcatggggggcgtgtcgaagaatgtcacagggctcctctcc

SEQ ID NO: 6759 - RNA, 84 nt, synthetic construct
  source 1..84: mol_type = other RNA
gccaagtgttccagccaccggcccagggcaatgaacacaaagagcatggggggcgtgtcgaagaatgtcacagggcttctctcc

SEQ ID NO: 6760 - RNA, 84 nt, synthetic construct
  source 1..84: mol_type = other RNA
gccaagtgttccagccaccggcccagggcaatgaacacaaagagcatggggggcgtgtcgaagaatgtcacagggctgcgctcc

SEQ ID NO: 6761 - RNA, 84 nt, synthetic construct
  source 1..84: mol_type = other RNA
gccaagtgttccagccaccggcccagggcaatgaacacaaagagcatggggggcgtgtcgaagaatgtcacagggctccgctcc

SEQ ID NO: 6762 - RNA, 84 nt, synthetic construct
  source 1..84: mol_type = other RNA
gccaagtgttccagccaccggcccagggcaatgaacacaaagagcatggggggcgtgtcgaagaatgtcacagggctcctctcc

SEQ ID NO: 6763 - RNA, 84 nt, synthetic construct
  source 1..84: mol_type = other RNA
gccaagtgttccagccaccggcccagggcaatgaacacaaagagcatggggggcgtgtcgaagaatgtcacagggctacgctcc

SEQ ID NO: 6764 - RNA, 84 nt, synthetic construct
  source 1..84: mol_type = other RNA
gccaagtgttccagccaccggcccagggcaatgaacacaaagagcatggggggcgtgtcgaagaatgtcacagggcttcgctcc

SEQ ID NO: 6765 - RNA, 85 nt, synthetic construct
  source 1..85: mol_type = other RNA
tgccaagtgttccagccaccggcccagggcaatgaacacaaagagcatggggggcgtgtcgaagaatgtcacagggctccgctcc

SEQ ID NO: 6766 - RNA, 85 nt, synthetic construct
  source 1..85: mol_type = other RNA
tgccaagtgttccagccaccggcccagggcaatgaacacaaagagcatggggggcgtgtcgaagaatgtcacagggcttcgctcc

SEQ ID NO: 6767 - RNA, 85 nt, synthetic construct
  source 1..85: mol_type = other RNA
tgccaagtgttccagccaccggcccagggcaatgaacacaaagagcatggggggcgtgtcgaagaatgtcacagggctcctctcc

SEQ ID NO: 6768 - RNA, 85 nt, synthetic construct
  source 1..85: mol_type = other RNA
tgccaagtgttccagccaccggcccagggcaatgaacacaaagagcatggggggcgtgtcgaagaatgtcacagggctgcgctcc

SEQ ID NO: 6769 - RNA, 85 nt, synthetic construct
  source 1..85: mol_type = other RNA
tgccaagtgttccagccaccggcccagggcaatgaacacaaagagcatggggggcgtgtcgaagaatgtcacagggctacgctcc

SEQ ID NO: 6770 - RNA, 85 nt, synthetic construct
  source 1..85: mol_type = other RNA
tgccaagtgttccagccaccggcccagggcaatgaacacaaagagcatggggggcgtgtcgaagaatgtcacagggcttctctcc

SEQ ID NO: 6771 - RNA, 86 nt, synthetic construct
  source 1..86: mol_type = other RNA
ttgccaagtgttccagccaccggcccagggcaatgaacacaaagagcatggggggcgtgtcgaagaatgtcacagggcttcgctcc

SEQ ID NO: 6772 - RNA, 86 nt, synthetic construct
  source 1..86: mol_type = other RNA
ttgccaagtgttccagccaccggcccagggcaatgaacacaaagagcatggggggcgtgtcgaagaatgtcacagggcttctctcc

SEQ ID NO: 6773 - RNA, 86 nt, synthetic construct
  source 1..86: mol_type = other RNA
ttgccaagtgttccagccaccggcccagggcaatgaacacaaagagcatggggggcgtgtcgaagaatgtcacagggctcctctcc

SEQ ID NO: 6774 - RNA, 86 nt, synthetic construct
  source 1..86: mol_type = other RNA
ttgccaagtgttccagccaccggcccagggcaatgaacacaaagagcatggggggcgtgtcgaagaatgtcacagggctccgctcc

SEQ ID NO: 6775 - RNA, 86 nt, synthetic construct
  source 1..86: mol_type = other RNA
ttgccaagtgttccagccaccggcccagggcaatgaacacaaagagcatggggggcgtgtcgaagaatgtcacagggctacgctcc

SEQ ID NO: 6776 - RNA, 86 nt, synthetic construct
  source 1..86: mol_type = other RNA
ttgccaagtgttccagccaccggcccagggcaatgaacacaaagagcatggggggcgtgtcgaagaatgtcacagggctgcgctcc

SEQ ID NO: 6777 - RNA, 87 nt, synthetic construct
  source 1..87: mol_type = other RNA
tttgccaagtgttccagccaccggcccagggcaatgaacacaaagagcatggggggcgtgtcgaagaatgtcacagggctccgctcc

SEQ ID NO: 6778 - RNA, 87 nt, synthetic construct
  source 1..87: mol_type = other RNA
tttgccaagtgttccagccaccggcccagggcaatgaacacaaagagcatggggggcgtgtcgaagaatgtcacagggcttctctcc

SEQ ID NO: 6779 - RNA, 87 nt, synthetic construct
  source 1..87: mol_type = other RNA
tttgccaagtgttccagccaccggcccagggcaatgaacacaaagagcatggggggcgtgtcgaagaatgtcacagggctcctctcc

SEQ ID NO: 6780 - RNA, 87 nt, synthetic construct
  source 1..87: mol_type = other RNA
tttgccaagtgttccagccaccggcccagggcaatgaacacaaagagcatggggggcgtgtcgaagaatgtcacagggcttcgctcc

SEQ ID NO: 6781 - RNA, 87 nt, synthetic construct
  source 1..87: mol_type = other RNA
tttgccaagtgttccagccaccggcccagggcaatgaacacaaagagcatggggggcgtgtcgaagaatgtcacagggctacgctcc

SEQ ID NO: 6782 - RNA, 87 nt, synthetic construct
  source 1..87: mol_type = other RNA
tttgccaagtgttccagccaccggcccagggcaatgaacacaaagagcatggggggcgtgtcgaagaatgtcacagggctgcgctcc

SEQ ID NO: 6783 - RNA, 88 nt, synthetic construct
  source 1..88: mol_type = other RNA
ctttgccaagtgttccagccaccggcccagggcaatgaacacaaagagcatggggggcgtgtcgaagaatgtcacagggcttctctcc

SEQ ID NO: 6784 - RNA, 88 nt, synthetic construct
  source 1..88: mol_type = other RNA
ctttgccaagtgttccagccaccggcccagggcaatgaacacaaagagcatggggggcgtgtcgaagaatgtcacagggctgcgctcc

SEQ ID NO: 6785 - RNA, 88 nt, synthetic construct
  source 1..88: mol_type = other RNA
ctttgccaagtgttccagccaccggcccagggcaatgaacacaaagagcatggggggcgtgtcgaagaatgtcacagggcttcgctcc

SEQ ID NO: 6786 - RNA, 88 nt, synthetic construct
  source 1..88: mol_type = other RNA
ctttgccaagtgttccagccaccggcccagggcaatgaacacaaagagcatggggggcgtgtcgaagaatgtcacagggctccgctcc

SEQ ID NO: 6787 - RNA, 88 nt, synthetic construct
  source 1..88: mol_type = other RNA
ctttgccaagtgttccagccaccggcccagggcaatgaacacaaagagcatggggggcgtgtcgaagaatgtcacagggctcctctcc

SEQ ID NO: 6788 - RNA, 88 nt, synthetic construct
  source 1..88: mol_type = other RNA
ctttgccaagtgttccagccaccggcccagggcaatgaacacaaagagcatggggggcgtgtcgaagaatgtcacagggctacgctcc

SEQ ID NO: 6789 - RNA, 89 nt, synthetic construct
  source 1..89: mol_type = other RNA
cctttgccaagtgttccagccaccggcccagggcaatgaacacaaagagcatggggggcgtgtcgaagaatgtcacagggctccgctcc

SEQ ID NO: 6790 - RNA, 89 nt, synthetic construct
  source 1..89: mol_type = other RNA
cctttgccaagtgttccagccaccggcccagggcaatgaacacaaagagcatggggggcgtgtcgaagaatgtcacagggcttctctcc

SEQ ID NO: 6791 - RNA, 89 nt, synthetic construct
  source 1..89: mol_type = other RNA
cctttgccaagtgttccagccaccggcccagggcaatgaacacaaagagcatggggggcgtgtcgaagaatgtcacagggcttcgctcc

SEQ ID NO: 6792 - RNA, 89 nt, synthetic construct
  source 1..89: mol_type = other RNA
cctttgccaagtgttccagccaccggcccagggcaatgaacacaaagagcatggggggcgtgtcgaagaatgtcacagggctgcgctcc

SEQ ID NO: 6793 - RNA, 89 nt, synthetic construct
  source 1..89: mol_type = other RNA
cctttgccaagtgttccagccaccggcccagggcaatgaacacaaagagcatggggggcgtgtcgaagaatgtcacagggctcctctcc

SEQ ID NO: 6794 - RNA, 89 nt, synthetic construct
  source 1..89: mol_type = other RNA
cctttgccaagtgttccagccaccggcccagggcaatgaacacaaagagcatggggggcgtgtcgaagaatgtcacagggctacgctcc

SEQ ID NO: 6795 - RNA, 90 nt, synthetic construct
  source 1..90: mol_type = other RNA
acctttgccaagtgttccagccaccggcccagggcaatgaacacaaagagcatggggggcgtgtcgaagaatgtcacagggcttctctcc

SEQ ID NO: 6796 - RNA, 90 nt, synthetic construct
  source 1..90: mol_type = other RNA
acctttgccaagtgttccagccaccggcccagggcaatgaacacaaagagcatggggggcgtgtcgaagaatgtcacagggcttcgctcc

SEQ ID NO: 6797 - RNA, 90 nt, synthetic construct
  source 1..90: mol_type = other RNA
acctttgccaagtgttccagccaccggcccagggcaatgaacacaaagagcatggggggcgtgtcgaagaatgtcacagggctccgctcc

SEQ ID NO: 6798 - RNA, 90 nt, synthetic construct
  source 1..90: mol_type = other RNA
acctttgccaagtgttccagccaccggcccagggcaatgaacacaaagagcatggggggcgtgtcgaagaatgtcacagggctacgctcc

SEQ ID NO: 6799 - RNA, 90 nt, synthetic construct
  source 1..90: mol_type = other RNA
acctttgccaagtgttccagccaccggcccagggcaatgaacacaaagagcatggggggcgtgtcgaagaatgtcacagggctgcgctcc

SEQ ID NO: 6800 - RNA, 90 nt, synthetic construct
  source 1..90: mol_type = other RNA
acctttgccaagtgttccagccaccggcccagggcaatgaacacaaagagcatggggggcgtgtcgaagaatgtcacagggctcctctcc

SEQ ID NO: 6801 - RNA, 91 nt, synthetic construct
  source 1..91: mol_type = other RNA
tacctttgccaagtgttccagccaccggcccagggcaatgaacacaaagagcatggggggcgtgtcgaagaatgtcacagggctacgctcc

SEQ ID NO: 6802 - RNA, 91 nt, synthetic construct
  source 1..91: mol_type = other RNA
tacctttgccaagtgttccagccaccggcccagggcaatgaacacaaagagcatggggggcgtgtcgaagaatgtcacagggctccgctcc

SEQ ID NO: 6803 - RNA, 91 nt, synthetic construct
  source 1..91: mol_type = other RNA
tacctttgccaagtgttccagccaccggcccagggcaatgaacacaaagagcatggggggcgtgtcgaagaatgtcacagggcttctctcc

SEQ ID NO: 6804 - RNA, 91 nt, synthetic construct
  source 1..91: mol_type = other RNA
tacctttgccaagtgttccagccaccggcccagggcaatgaacacaaagagcatggggggcgtgtcgaagaatgtcacagggctgcgctcc

SEQ ID NO: 6805 - RNA, 91 nt, synthetic construct
  source 1..91: mol_type = other RNA
tacctttgccaagtgttccagccaccggcccagggcaatgaacacaaagagcatggggggcgtgtcgaagaatgtcacagggcttcgctcc

SEQ ID NO: 6806 - RNA, 91 nt, synthetic construct
  source 1..91: mol_type = other RNA
tacctttgccaagtgttccagccaccggcccagggcaatgaacacaaagagcatggggggcgtgtcgaagaatgtcacagggctcctctcc

SEQ ID NO: 6807 - RNA, 92 nt, synthetic construct
  source 1..92: mol_type = other RNA
ttacctttgccaagtgttccagccaccggcccagggcaatgaacacaaagagcatggggggcgtgtcgaagaatgtcacagggcttctctcc

SEQ ID NO: 6808 - RNA, 92 nt, synthetic construct
  source 1..92: mol_type = other RNA
ttacctttgccaagtgttccagccaccggcccagggcaatgaacacaaagagcatggggggcgtgtcgaagaatgtcacagggctccgctcc

SEQ ID NO: 6809 - RNA, 92 nt, synthetic construct
  source 1..92: mol_type = other RNA
ttacctttgccaagtgttccagccaccggcccagggcaatgaacacaaagagcatggggggcgtgtcgaagaatgtcacagggctacgctcc

SEQ ID NO: 6810 - RNA, 92 nt, synthetic construct
  source 1..92: mol_type = other RNA
ttacctttgccaagtgttccagccaccggcccagggcaatgaacacaaagagcatggggggcgtgtcgaagaatgtcacagggctcctctcc

SEQ ID NO: 6811 - RNA, 92 nt, synthetic construct
  source 1..92: mol_type = other RNA
ttacctttgccaagtgttccagccaccggcccagggcaatgaacacaaagagcatggggggcgtgtcgaagaatgtcacagggctgcgctcc

SEQ ID NO: 6812 - RNA, 92 nt, synthetic construct
  source 1..92: mol_type = other RNA
ttacctttgccaagtgttccagccaccggcccagggcaatgaacacaaagagcatggggggcgtgtcgaagaatgtcacagggcttcgctcc

SEQ ID NO: 6813 - RNA, 93 nt, synthetic construct
  source 1..93: mol_type = other RNA
gttacctttgccaagtgttccagccaccggcccagggcaatgaacacaaagagcatggggggcgtgtcgaagaatgtcacagggctgcgctcc

SEQ ID NO: 6814 - RNA, 93 nt, synthetic construct
  source 1..93: mol_type = other RNA
gttacctttgccaagtgttccagccaccggcccagggcaatgaacacaaagagcatggggggcgtgtcgaagaatgtcacagggctcctctcc

SEQ ID NO: 6815 - RNA, 93 nt, synthetic construct
  source 1..93: mol_type = other RNA
gttacctttgccaagtgttccagccaccggcccagggcaatgaacacaaagagcatggggggcgtgtcgaagaatgtcacagggctccgctcc

SEQ ID NO: 6816 - RNA, 93 nt, synthetic construct
  source 1..93: mol_type = other RNA
gttacctttgccaagtgttccagccaccggcccagggcaatgaacacaaagagcatggggggcgtgtcgaagaatgtcacagggcttctctcc

SEQ ID NO: 6817 - RNA, 93 nt, synthetic construct
  source 1..93: mol_type = other RNA
gttacctttgccaagtgttccagccaccggcccagggcaatgaacacaaagagcatggggggcgtgtcgaagaatgtcacagggcttcgctcc

SEQ ID NO: 6818 - RNA, 93 nt, synthetic construct
  source 1..93: mol_type = other RNA
gttacctttgccaagtgttccagccaccggcccagggcaatgaacacaaagagcatggggggcgtgtcgaagaatgtcacagggctacgctcc

SEQ ID NO: 6819 - RNA, 94 nt, synthetic construct
  source 1..94: mol_type = other RNA
tgttacctttgccaagtgttccagccaccggcccagggcaatgaacacaaagagcatggggggcgtgtcgaagaatgtcacagggctgcgctcc

SEQ ID NO: 6820 - RNA, 94 nt, synthetic construct
  source 1..94: mol_type = other RNA
tgttacctttgccaagtgttccagccaccggcccagggcaatgaacacaaagagcatggggggcgtgtcgaagaatgtcacagggctcctctcc

SEQ ID NO: 6821 - RNA, 94 nt, synthetic construct
  source 1..94: mol_type = other RNA
tgttacctttgccaagtgttccagccaccggcccagggcaatgaacacaaagagcatggggggcgtgtcgaagaatgtcacagggcttctctcc

SEQ ID NO: 6822 - RNA, 94 nt, synthetic construct
  source 1..94: mol_type = other RNA
tgttacctttgccaagtgttccagccaccggcccagggcaatgaacacaaagagcatggggggcgtgtcgaagaatgtcacagggctccgctcc

SEQ ID NO: 6823 - RNA, 94 nt, synthetic construct
  source 1..94: mol_type = other RNA
tgttacctttgccaagtgttccagccaccggcccagggcaatgaacacaaagagcatggggggcgtgtcgaagaatgtcacagggcttcgctcc

SEQ ID NO: 6824 - RNA, 94 nt, synthetic construct
  source 1..94: mol_type = other RNA
tgttacctttgccaagtgttccagccaccggcccagggcaatgaacacaaagagcatggggggcgtgtcgaagaatgtcacagggctacgctcc

SEQ ID NO: 6825 - RNA, 95 nt, synthetic construct
  source 1..95: mol_type = other RNA
ctgttacctttgccaagtgttccagccaccggcccagggcaatgaacacaaagagcatggggggcgtgtcgaagaatgtcacagggctgcgctcc

SEQ ID NO: 6826 - RNA, 95 nt, synthetic construct
  source 1..95: mol_type = other RNA
ctgttacctttgccaagtgttccagccaccggcccagggcaatgaacacaaagagcatggggggcgtgtcgaagaatgtcacagggctccgctcc

SEQ ID NO: 6827 - RNA, 95 nt, synthetic construct
  source 1..95: mol_type = other RNA
ctgttacctttgccaagtgttccagccaccggcccagggcaatgaacacaaagagcatggggggcgtgtcgaagaatgtcacagggctcctctcc

SEQ ID NO: 6828 - RNA, 95 nt, synthetic construct
  source 1..95: mol_type = other RNA
ctgttacctttgccaagtgttccagccaccggcccagggcaatgaacacaaagagcatggggggcgtgtcgaagaatgtcacagggcttcgctcc

SEQ ID NO: 6829 - RNA, 95 nt, synthetic construct
  source 1..95: mol_type = other RNA
ctgttacctttgccaagtgttccagccaccggcccagggcaatgaacacaaagagcatggggggcgtgtcgaagaatgtcacagggcttctctcc

SEQ ID NO: 6830 - RNA, 95 nt, synthetic construct
  source 1..95: mol_type = other RNA
ctgttacctttgccaagtgttccagccaccggcccagggcaatgaacacaaagagcatggggggcgtgtcgaagaatgtcacagggctacgctcc

SEQ ID NO: 6831 - RNA, 96 nt, synthetic construct
  source 1..96: mol_type = other RNA
gctgttacctttgccaagtgttccagccaccggcccagggcaatgaacacaaagagcatggggggcgtgtcgaagaatgtcacagggctgcgctcc

SEQ ID NO: 6832 - RNA, 96 nt, synthetic construct
  source 1..96: mol_type = other RNA
gctgttacctttgccaagtgttccagccaccggcccagggcaatgaacacaaagagcatggggggcgtgtcgaagaatgtcacagggctcctctcc

SEQ ID NO: 6833 - RNA, 96 nt, synthetic construct
  source 1..96: mol_type = other RNA
gctgttacctttgccaagtgttccagccaccggcccagggcaatgaacacaaagagcatggggggcgtgtcgaagaatgtcacagggctacgctcc

SEQ ID NO: 6834 - RNA, 96 nt, synthetic construct
  source 1..96: mol_type = other RNA
gctgttacctttgccaagtgttccagccaccggcccagggcaatgaacacaaagagcatggggggcgtgtcgaagaatgtcacagggcttcgctcc

SEQ ID NO: 6835 - RNA, 96 nt, synthetic construct
  source 1..96: mol_type = other RNA
gctgttacctttgccaagtgttccagccaccggcccagggcaatgaacacaaagagcatggggggcgtgtcgaagaatgtcacagggctccgctcc

SEQ ID NO: 6836 - RNA, 96 nt, synthetic construct
  source 1..96: mol_type = other RNA
gctgttacctttgccaagtgttccagccaccggcccagggcaatgaacacaaagagcatggggggcgtgtcgaagaatgtcacagggcttctctcc

SEQ ID NO: 6837 - RNA, 97 nt, synthetic construct
  source 1..97: mol_type = other RNA
tgctgttacctttgccaagtgttccagccaccggcccagggcaatgaacacaaagagcatggggggcgtgtcgaagaatgtcacagggctacgctcc

SEQ ID NO: 6838 - RNA, 97 nt, synthetic construct
  source 1..97: mol_type = other RNA
tgctgttacctttgccaagtgttccagccaccggcccagggcaatgaacacaaagagcatggggggcgtgtcgaagaatgtcacagggctcctctcc

SEQ ID NO: 6839 - RNA, 97 nt, synthetic construct
  source 1..97: mol_type = other RNA
tgctgttacctttgccaagtgttccagccaccggcccagggcaatgaacacaaagagcatggggggcgtgtcgaagaatgtcacagggcttctctcc

SEQ ID NO: 6840 - RNA, 97 nt, synthetic construct
  source 1..97: mol_type = other RNA
tgctgttacctttgccaagtgttccagccaccggcccagggcaatgaacacaaagagcatggggggcgtgtcgaagaatgtcacagggctgcgctcc

SEQ ID NO: 6841 - RNA, 97 nt, synthetic construct
  source 1..97: mol_type = other RNA
tgctgttacctttgccaagtgttccagccaccggcccagggcaatgaacacaaagagcatggggggcgtgtcgaagaatgtcacagggcttcgctcc

SEQ ID NO: 6842 - RNA, 97 nt, synthetic construct
  source 1..97: mol_type = other RNA
tgctgttacctttgccaagtgttccagccaccggcccagggcaatgaacacaaagagcatggggggcgtgtcgaagaatgtcacagggctccgctcc

SEQ ID NO: 6843 - RNA, 98 nt, synthetic construct
  source 1..98: mol_type = other RNA
ctgctgttacctttgccaagtgttccagccaccggcccagggcaatgaacacaaagagcatggggggcgtgtcgaagaatgtcacagggctcctctcc

SEQ ID NO: 6844 - RNA, 98 nt, synthetic construct
  source 1..98: mol_type = other RNA
ctgctgttacctttgccaagtgttccagccaccggcccagggcaatgaacacaaagagcatggggggcgtgtcgaagaatgtcacagggcttctctcc

SEQ ID NO: 6845 - RNA, 98 nt, synthetic construct
  source 1..98: mol_type = other RNA
ctgctgttacctttgccaagtgttccagccaccggcccagggcaatgaacacaaagagcatggggggcgtgtcgaagaatgtcacagggctccgctcc

SEQ ID NO: 6846 - RNA, 98 nt, synthetic construct
  source 1..98: mol_type = other RNA
ctgctgttacctttgccaagtgttccagccaccggcccagggcaatgaacacaaagagcatggggggcgtgtcgaagaatgtcacagggcttcgctcc

SEQ ID NO: 6847 - RNA, 98 nt, synthetic construct
  source 1..98: mol_type = other RNA
ctgctgttacctttgccaagtgttccagccaccggcccagggcaatgaacacaaagagcatggggggcgtgtcgaagaatgtcacagggctgcgctcc

SEQ ID NO: 6848 - RNA, 98 nt, synthetic construct
  source 1..98: mol_type = other RNA
ctgctgttacctttgccaagtgttccagccaccggcccagggcaatgaacacaaagagcatggggggcgtgtcgaagaatgtcacagggctacgctcc

SEQ ID NO: 6849 - RNA, 99 nt, synthetic construct
  source 1..99: mol_type = other RNA
gctgctgttacctttgccaagtgttccagccaccggcccagggcaatgaacacaaagagcatggggggcgtgtcgaagaatgtcacagggctcctctcc

SEQ ID NO: 6850 - RNA, 99 nt, synthetic construct
  source 1..99: mol_type = other RNA
gctgctgttacctttgccaagtgttccagccaccggcccagggcaatgaacacaaagagcatggggggcgtgtcgaagaatgtcacagggctccgctcc

SEQ ID NO: 6851 - RNA, 99 nt, synthetic construct
  source 1..99: mol_type = other RNA
gctgctgttacctttgccaagtgttccagccaccggcccagggcaatgaacacaaagagcatggggggcgtgtcgaagaatgtcacagggcttcgctcc

SEQ ID NO: 6852 - RNA, 99 nt, synthetic construct
  source 1..99: mol_type = other RNA
gctgctgttacctttgccaagtgttccagccaccggcccagggcaatgaacacaaagagcatggggggcgtgtcgaagaatgtcacagggcttctctcc

SEQ ID NO: 6853 - RNA, 99 nt, synthetic construct
  source 1..99: mol_type = other RNA
gctgctgttacctttgccaagtgttccagccaccggcccagggcaatgaacacaaagagcatggggggcgtgtcgaagaatgtcacagggctacgctcc

SEQ ID NO: 6854 - RNA, 99 nt, synthetic construct
  source 1..99: mol_type = other RNA
gctgctgttacctttgccaagtgttccagccaccggcccagggcaatgaacacaaagagcatggggggcgtgtcgaagaatgtcacagggctgcgctcc

SEQ ID NO: 6855 - RNA, 100 nt, synthetic construct
  source 1..100: mol_type = other RNA
agctgctgttacctttgccaagtgttccagccaccggcccagggcaatgaacacaaagagcatggggggcgtgtcgaagaatgtcacagggctacgctcc

SEQ ID NO: 6856 - RNA, 100 nt, synthetic construct
  source 1..100: mol_type = other RNA
agctgctgttacctttgccaagtgttccagccaccggcccagggcaatgaacacaaagagcatggggggcgtgtcgaagaatgtcacagggctccgctcc

SEQ ID NO: 6857 - RNA, 100 nt, synthetic construct
  source 1..100: mol_type = other RNA
agctgctgttacctttgccaagtgttccagccaccggcccagggcaatgaacacaaagagcatggggggcgtgtcgaagaatgtcacagggctcctctcc

SEQ ID NO: 6858 - RNA, 100 nt, synthetic construct
  source 1..100: mol_type = other RNA
agctgctgttacctttgccaagtgttccagccaccggcccagggcaatgaacacaaagagcatggggggcgtgtcgaagaatgtcacagggcttctctcc

SEQ ID NO: 6859 - RNA, 100 nt, synthetic construct
  source 1..100: mol_type = other RNA
agctgctgttacctttgccaagtgttccagccaccggcccagggcaatgaacacaaagagcatggggggcgtgtcgaagaatgtcacagggctgcgctcc

SEQ ID NO: 6860 - RNA, 100 nt, synthetic construct
  source 1..100: mol_type = other RNA
agctgctgttacctttgccaagtgttccagccaccggcccagggcaatgaacacaaagagcatggggggcgtgtcgaagaatgtcacagggcttcgctcc

SEQ ID NO: 6861 - RNA, 16 nt, synthetic construct
  source 1..16: mol_type = other RNA
ctgagaaggcggagag

SEQ ID NO: 6862 - RNA, 17 nt, synthetic construct
  source 1..17: mol_type = other RNA
gctgagaaggcggagag

SEQ ID NO: 6863 - RNA, 18 nt, synthetic construct
  source 1..18: mol_type = other RNA
ggctgagaaggcggagag

SEQ ID NO: 6864 - RNA, 19 nt, synthetic construct
  source 1..19: mol_type = other RNA
tggctgagaaggcggagag

SEQ ID NO: 6865 - RNA, 20 nt, synthetic construct
  source 1..20: mol_type = other RNA
gtggctgagaaggcggagag

SEQ ID NO: 6866 - RNA, 21 nt, synthetic construct
  source 1..21: mol_type = other RNA
tgtggctgagaaggcggagag

SEQ ID NO: 6867 - RNA, 22 nt, synthetic construct
  source 1..22: mol_type = other RNA
ctgtggctgagaaggcggagag

SEQ ID NO: 6868-6874 - skipped (7 entries)

SEQ ID NO: 6875 - RNA, 10 nt, synthetic construct
  source 1..10: mol_type = other RNA
tccgccttct

SEQ ID NO: 6876 - RNA, 11 nt, synthetic construct
  source 1..11: mol_type = other RNA
tccgccttctc

SEQ ID NO: 6877 - RNA, 12 nt, synthetic construct
  source 1..12: mol_type = other RNA
tccgccttctca

SEQ ID NO: 6878 - RNA, 13 nt, synthetic construct
  source 1..13: mol_type = other RNA
tccgccttctcag

SEQ ID NO: 6879 - RNA, 14 nt, synthetic construct
  source 1..14: mol_type = other RNA
tccgccttctcagc

SEQ ID NO: 6880 - RNA, 15 nt, synthetic construct
  source 1..15: mol_type = other RNA
tccgccttctcagcc

SEQ ID NO: 6881 - RNA, 16 nt, synthetic construct
  source 1..16: mol_type = other RNA
tccgccttctcagcca

SEQ ID NO: 6882 - RNA, 17 nt, synthetic construct
  source 1..17: mol_type = other RNA
tccgccttctcagccac

SEQ ID NO: 6883 - RNA, 18 nt, synthetic construct
  source 1..18: mol_type = other RNA
tccgccttctcagccaca

SEQ ID NO: 6884 - RNA, 19 nt, synthetic construct
  source 1..19: mol_type = other RNA
tccgccttctcagccacag

SEQ ID NO: 6885 - RNA, 63 nt, synthetic construct
  source 1..63: mol_type = other RNA
cggcccagggcaatgaacacaaagagcatggggggcgtgtcgaagaatgtcacaggtgacctc

SEQ ID NO: 6886 - RNA, 63 nt, synthetic construct
  source 1..63: mol_type = other RNA
cggcccagggcaatgaacacaaagagcatggggggcgtgtcgaagaatgtcacagggctcctc

SEQ ID NO: 6887 - RNA, 63 nt, synthetic construct
  source 1..63: mol_type = other RNA
cggcccagggcaatgaacacaaagagcatggggggcgtgtcgaagaatgtcacaggagacctc

SEQ ID NO: 6888 - RNA, 63 nt, synthetic construct
  source 1..63: mol_type = other RNA
cggcccagggcaatgaacacaaagagcatggggggcgtgtcgaagaatgtcacaggggacctc

SEQ ID NO: 6889 - RNA, 63 nt, synthetic construct
  source 1..63: mol_type = other RNA
cggcccagggcaatgaacacaaagagcatggggggcgtgtcgaagaatgtcacaggcgacctc

SEQ ID NO: 6890 - RNA, 64 nt, synthetic construct
  source 1..64: mol_type = other RNA
ccggcccagggcaatgaacacaaagagcatggggggcgtgtcgaagaatgtcacaggcgacctc

SEQ ID NO: 6891 - RNA, 64 nt, synthetic construct
  source 1..64: mol_type = other RNA
ccggcccagggcaatgaacacaaagagcatggggggcgtgtcgaagaatgtcacaggtgacctc

SEQ ID NO: 6892 - RNA, 64 nt, synthetic construct
  source 1..64: mol_type = other RNA
ccggcccagggcaatgaacacaaagagcatggggggcgtgtcgaagaatgtcacagggctcctc

SEQ ID NO: 6893 - RNA, 64 nt, synthetic construct
  source 1..64: mol_type = other RNA
ccggcccagggcaatgaacacaaagagcatggggggcgtgtcgaagaatgtcacaggggacctc

SEQ ID NO: 6894 - RNA, 64 nt, synthetic construct
  source 1..64: mol_type = other RNA
ccggcccagggcaatgaacacaaagagcatggggggcgtgtcgaagaatgtcacaggagacctc

SEQ ID NO: 6895 - RNA, 65 nt, synthetic construct
  source 1..65: mol_type = other RNA
accggcccagggcaatgaacacaaagagcatggggggcgtgtcgaagaatgtcacaggagacctc

SEQ ID NO: 6896 - RNA, 65 nt, synthetic construct
  source 1..65: mol_type = other RNA
accggcccagggcaatgaacacaaagagcatggggggcgtgtcgaagaatgtcacaggtgacctc

SEQ ID NO: 6897 - RNA, 65 nt, synthetic construct
  source 1..65: mol_type = other RNA
accggcccagggcaatgaacacaaagagcatggggggcgtgtcgaagaatgtcacaggcgacctc

SEQ ID NO: 6898 - RNA, 65 nt, synthetic construct
  source 1..65: mol_type = other RNA
accggcccagggcaatgaacacaaagagcatggggggcgtgtcgaagaatgtcacaggggacctc

SEQ ID NO: 6899 - RNA, 65 nt, synthetic construct
  source 1..65: mol_type = other RNA
accggcccagggcaatgaacacaaagagcatggggggcgtgtcgaagaatgtcacagggctcctc

SEQ ID NO: 6900 - RNA, 66 nt, synthetic construct
  source 1..66: mol_type = other RNA
caccggcccagggcaatgaacacaaagagcatggggggcgtgtcgaagaatgtcacaggggacctc

SEQ ID NO: 6901 - RNA, 66 nt, synthetic construct
  source 1..66: mol_type = other RNA
caccggcccagggcaatgaacacaaagagcatggggggcgtgtcgaagaatgtcacaggtgacctc

SEQ ID NO: 6902 - RNA, 66 nt, synthetic construct
  source 1..66: mol_type = other RNA
caccggcccagggcaatgaacacaaagagcatggggggcgtgtcgaagaatgtcacaggagacctc

SEQ ID NO: 6903 - RNA, 66 nt, synthetic construct
  source 1..66: mol_type = other RNA
caccggcccagggcaatgaacacaaagagcatggggggcgtgtcgaagaatgtcacagggctcctc

SEQ ID NO: 6904 - RNA, 66 nt, synthetic construct
  source 1..66: mol_type = other RNA
caccggcccagggcaatgaacacaaagagcatggggggcgtgtcgaagaatgtcacaggcgacctc

SEQ ID NO: 6905 - RNA, 67 nt, synthetic construct
  source 1..67: mol_type = other RNA
ccaccggcccagggcaatgaacacaaagagcatggggggcgtgtcgaagaatgtcacaggagacctc

SEQ ID NO: 6906 - RNA, 67 nt, synthetic construct
  source 1..67: mol_type = other RNA
ccaccggcccagggcaatgaacacaaagagcatggggggcgtgtcgaagaatgtcacaggcgacctc

SEQ ID NO: 6907 - RNA, 67 nt, synthetic construct
  source 1..67: mol_type = other RNA
ccaccggcccagggcaatgaacacaaagagcatggggggcgtgtcgaagaatgtcacagggctcctc

SEQ ID NO: 6908 - RNA, 67 nt, synthetic construct
  source 1..67: mol_type = other RNA
ccaccggcccagggcaatgaacacaaagagcatggggggcgtgtcgaagaatgtcacaggtgacctc

SEQ ID NO: 6909 - RNA, 67 nt, synthetic construct
  source 1..67: mol_type = other RNA
ccaccggcccagggcaatgaacacaaagagcatggggggcgtgtcgaagaatgtcacaggggacctc

SEQ ID NO: 6910 - RNA, 68 nt, synthetic construct
  source 1..68: mol_type = other RNA
gccaccggcccagggcaatgaacacaaagagcatggggggcgtgtcgaagaatgtcacaggcgacctc

SEQ ID NO: 6911 - RNA, 68 nt, synthetic construct
  source 1..68: mol_type = other RNA
gccaccggcccagggcaatgaacacaaagagcatggggggcgtgtcgaagaatgtcacaggggacctc

SEQ ID NO: 6912 - RNA, 68 nt, synthetic construct
  source 1..68: mol_type = other RNA
gccaccggcccagggcaatgaacacaaagagcatggggggcgtgtcgaagaatgtcacaggagacctc

SEQ ID NO: 6913 - RNA, 68 nt, synthetic construct
  source 1..68: mol_type = other RNA
gccaccggcccagggcaatgaacacaaagagcatggggggcgtgtcgaagaatgtcacagggctcctc

SEQ ID NO: 6914 - RNA, 68 nt, synthetic construct
  source 1..68: mol_type = other RNA
gccaccggcccagggcaatgaacacaaagagcatggggggcgtgtcgaagaatgtcacaggtgacctc

SEQ ID NO: 6915 - RNA, 69 nt, synthetic construct
  source 1..69: mol_type = other RNA
agccaccggcccagggcaatgaacacaaagagcatggggggcgtgtcgaagaatgtcacaggtgacctc

SEQ ID NO: 6916 - RNA, 69 nt, synthetic construct
  source 1..69: mol_type = other RNA
agccaccggcccagggcaatgaacacaaagagcatggggggcgtgtcgaagaatgtcacaggggacctc

SEQ ID NO: 6917 - RNA, 69 nt, synthetic construct
  source 1..69: mol_type = other RNA
agccaccggcccagggcaatgaacacaaagagcatggggggcgtgtcgaagaatgtcacaggcgacctc

SEQ ID NO: 6918 - RNA, 69 nt, synthetic construct
  source 1..69: mol_type = other RNA
agccaccggcccagggcaatgaacacaaagagcatggggggcgtgtcgaagaatgtcacaggagacctc

SEQ ID NO: 6919 - RNA, 69 nt, synthetic construct
  source 1..69: mol_type = other RNA
agccaccggcccagggcaatgaacacaaagagcatggggggcgtgtcgaagaatgtcacagggctcctc

SEQ ID NO: 6920 - RNA, 70 nt, synthetic construct
  source 1..70: mol_type = other RNA
cagccaccggcccagggcaatgaacacaaagagcatggggggcgtgtcgaagaatgtcacaggggacctc

SEQ ID NO: 6921 - RNA, 70 nt, synthetic construct
  source 1..70: mol_type = other RNA
cagccaccggcccagggcaatgaacacaaagagcatggggggcgtgtcgaagaatgtcacaggcgacctc

SEQ ID NO: 6922 - RNA, 70 nt, synthetic construct
  source 1..70: mol_type = other RNA
cagccaccggcccagggcaatgaacacaaagagcatggggggcgtgtcgaagaatgtcacagggctcctc

SEQ ID NO: 6923 - RNA, 70 nt, synthetic construct
  source 1..70: mol_type = other RNA
cagccaccggcccagggcaatgaacacaaagagcatggggggcgtgtcgaagaatgtcacaggagacctc

SEQ ID NO: 6924 - RNA, 70 nt, synthetic construct
  source 1..70: mol_type = other RNA
cagccaccggcccagggcaatgaacacaaagagcatggggggcgtgtcgaagaatgtcacaggtgacctc

SEQ ID NO: 6925 - RNA, 71 nt, synthetic construct
  source 1..71: mol_type = other RNA
ccagccaccggcccagggcaatgaacacaaagagcatggggggcgtgtcgaagaatgtcacaggcgacctc

SEQ ID NO: 6926 - RNA, 71 nt, synthetic construct
  source 1..71: mol_type = other RNA
ccagccaccggcccagggcaatgaacacaaagagcatggggggcgtgtcgaagaatgtcacaggtgacctc

SEQ ID NO: 6927 - RNA, 71 nt, synthetic construct
  source 1..71: mol_type = other RNA
ccagccaccggcccagggcaatgaacacaaagagcatggggggcgtgtcgaagaatgtcacaggagacctc

SEQ ID NO: 6928 - RNA, 71 nt, synthetic construct
  source 1..71: mol_type = other RNA
ccagccaccggcccagggcaatgaacacaaagagcatggggggcgtgtcgaagaatgtcacagggctcctc

SEQ ID NO: 6929 - RNA, 71 nt, synthetic construct
  source 1..71: mol_type = other RNA
ccagccaccggcccagggcaatgaacacaaagagcatggggggcgtgtcgaagaatgtcacaggggacctc

SEQ ID NO: 6930 - RNA, 72 nt, synthetic construct
  source 1..72: mol_type = other RNA
tccagccaccggcccagggcaatgaacacaaagagcatggggggcgtgtcgaagaatgtcacaggggacctc

SEQ ID NO: 6931 - RNA, 72 nt, synthetic construct
  source 1..72: mol_type = other RNA
tccagccaccggcccagggcaatgaacacaaagagcatggggggcgtgtcgaagaatgtcacaggagacctc

SEQ ID NO: 6932 - RNA, 72 nt, synthetic construct
  source 1..72: mol_type = other RNA
tccagccaccggcccagggcaatgaacacaaagagcatggggggcgtgtcgaagaatgtcacagggctcctc

SEQ ID NO: 6933 - RNA, 72 nt, synthetic construct
  source 1..72: mol_type = other RNA
tccagccaccggcccagggcaatgaacacaaagagcatggggggcgtgtcgaagaatgtcacaggtgacctc

SEQ ID NO: 6934 - RNA, 72 nt, synthetic construct
  source 1..72: mol_type = other RNA
tccagccaccggcccagggcaatgaacacaaagagcatggggggcgtgtcgaagaatgtcacaggcgacctc

SEQ ID NO: 6935 - RNA, 73 nt, synthetic construct
  source 1..73: mol_type = other RNA
ttccagccaccggcccagggcaatgaacacaaagagcatggggggcgtgtcgaagaatgtcacaggcgacctc

SEQ ID NO: 6936 - RNA, 73 nt, synthetic construct
  source 1..73: mol_type = other RNA
ttccagccaccggcccagggcaatgaacacaaagagcatggggggcgtgtcgaagaatgtcacagggctcctc

SEQ ID NO: 6937 - RNA, 73 nt, synthetic construct
  source 1..73: mol_type = other RNA
ttccagccaccggcccagggcaatgaacacaaagagcatggggggcgtgtcgaagaatgtcacaggtgacctc

SEQ ID NO: 6938 - RNA, 73 nt, synthetic construct
  source 1..73: mol_type = other RNA
ttccagccaccggcccagggcaatgaacacaaagagcatggggggcgtgtcgaagaatgtcacaggggacctc

SEQ ID NO: 6939 - RNA, 73 nt, synthetic construct
  source 1..73: mol_type = other RNA
ttccagccaccggcccagggcaatgaacacaaagagcatggggggcgtgtcgaagaatgtcacaggagacctc

SEQ ID NO: 6940 - RNA, 74 nt, synthetic construct
  source 1..74: mol_type = other RNA
gttccagccaccggcccagggcaatgaacacaaagagcatggggggcgtgtcgaagaatgtcacagggctcctc

SEQ ID NO: 6941 - RNA, 74 nt, synthetic construct
  source 1..74: mol_type = other RNA
gttccagccaccggcccagggcaatgaacacaaagagcatggggggcgtgtcgaagaatgtcacaggcgacctc

SEQ ID NO: 6942 - RNA, 74 nt, synthetic construct
  source 1..74: mol_type = other RNA
gttccagccaccggcccagggcaatgaacacaaagagcatggggggcgtgtcgaagaatgtcacaggggacctc

SEQ ID NO: 6943 - RNA, 74 nt, synthetic construct
  source 1..74: mol_type = other RNA
gttccagccaccggcccagggcaatgaacacaaagagcatggggggcgtgtcgaagaatgtcacaggagacctc

SEQ ID NO: 6944 - RNA, 74 nt, synthetic construct
  source 1..74: mol_type = other RNA
gttccagccaccggcccagggcaatgaacacaaagagcatggggggcgtgtcgaagaatgtcacaggtgacctc

SEQ ID NO: 6945 - RNA, 75 nt, synthetic construct
  source 1..75: mol_type = other RNA
tgttccagccaccggcccagggcaatgaacacaaagagcatggggggcgtgtcgaagaatgtcacaggggacctc

SEQ ID NO: 6946 - RNA, 75 nt, synthetic construct
  source 1..75: mol_type = other RNA
tgttccagccaccggcccagggcaatgaacacaaagagcatggggggcgtgtcgaagaatgtcacaggagacctc

SEQ ID NO: 6947 - RNA, 75 nt, synthetic construct
  source 1..75: mol_type = other RNA
tgttccagccaccggcccagggcaatgaacacaaagagcatggggggcgtgtcgaagaatgtcacagggctcctc

SEQ ID NO: 6948 - RNA, 75 nt, synthetic construct
  source 1..75: mol_type = other RNA
tgttccagccaccggcccagggcaatgaacacaaagagcatggggggcgtgtcgaagaatgtcacaggtgacctc

SEQ ID NO: 6949 - RNA, 75 nt, synthetic construct
  source 1..75: mol_type = other RNA
tgttccagccaccggcccagggcaatgaacacaaagagcatggggggcgtgtcgaagaatgtcacaggcgacctc

SEQ ID NO: 6950 - RNA, 76 nt, synthetic construct
  source 1..76: mol_type = other RNA
gtgttccagccaccggcccagggcaatgaacacaaagagcatggggggcgtgtcgaagaatgtcacagggctcctc

SEQ ID NO: 6951 - RNA, 76 nt, synthetic construct
  source 1..76: mol_type = other RNA
gtgttccagccaccggcccagggcaatgaacacaaagagcatggggggcgtgtcgaagaatgtcacaggtgacctc

SEQ ID NO: 6952 - RNA, 76 nt, synthetic construct
  source 1..76: mol_type = other RNA
gtgttccagccaccggcccagggcaatgaacacaaagagcatggggggcgtgtcgaagaatgtcacaggcgacctc

SEQ ID NO: 6953 - RNA, 76 nt, synthetic construct
  source 1..76: mol_type = other RNA
gtgttccagccaccggcccagggcaatgaacacaaagagcatggggggcgtgtcgaagaatgtcacaggagacctc

SEQ ID NO: 6954 - RNA, 76 nt, synthetic construct
  source 1..76: mol_type = other RNA
gtgttccagccaccggcccagggcaatgaacacaaagagcatggggggcgtgtcgaagaatgtcacaggggacctc

SEQ ID NO: 6955 - RNA, 77 nt, synthetic construct
  source 1..77: mol_type = other RNA
agtgttccagccaccggcccagggcaatgaacacaaagagcatggggggcgtgtcgaagaatgtcacaggcgacctc

SEQ ID NO: 6956 - RNA, 77 nt, synthetic construct
  source 1..77: mol_type = other RNA
agtgttccagccaccggcccagggcaatgaacacaaagagcatggggggcgtgtcgaagaatgtcacaggggacctc

SEQ ID NO: 6957 - RNA, 77 nt, synthetic construct
  source 1..77: mol_type = other RNA
agtgttccagccaccggcccagggcaatgaacacaaagagcatggggggcgtgtcgaagaatgtcacaggtgacctc

SEQ ID NO: 6958 - RNA, 77 nt, synthetic construct
  source 1..77: mol_type = other RNA
agtgttccagccaccggcccagggcaatgaacacaaagagcatggggggcgtgtcgaagaatgtcacagggctcctc

SEQ ID NO: 6959 - RNA, 77 nt, synthetic construct
  source 1..77: mol_type = other RNA
agtgttccagccaccggcccagggcaatgaacacaaagagcatggggggcgtgtcgaagaatgtcacaggagacctc

SEQ ID NO: 6960 - RNA, 78 nt, synthetic construct
  source 1..78: mol_type = other RNA
aagtgttccagccaccggcccagggcaatgaacacaaagagcatggggggcgtgtcgaagaatgtcacaggcgacctc

SEQ ID NO: 6961 - RNA, 78 nt, synthetic construct
  source 1..78: mol_type = other RNA
aagtgttccagccaccggcccagggcaatgaacacaaagagcatggggggcgtgtcgaagaatgtcacaggggacctc

SEQ ID NO: 6962 - RNA, 78 nt, synthetic construct
  source 1..78: mol_type = other RNA
aagtgttccagccaccggcccagggcaatgaacacaaagagcatggggggcgtgtcgaagaatgtcacaggtgacctc

SEQ ID NO: 6963 - RNA, 78 nt, synthetic construct
  source 1..78: mol_type = other RNA
aagtgttccagccaccggcccagggcaatgaacacaaagagcatggggggcgtgtcgaagaatgtcacaggagacctc

SEQ ID NO: 6964 - RNA, 78 nt, synthetic construct
  source 1..78: mol_type = other RNA
aagtgttccagccaccggcccagggcaatgaacacaaagagcatggggggcgtgtcgaagaatgtcacagggctcctc

SEQ ID NO: 6965 - RNA, 79 nt, synthetic construct
  source 1..79: mol_type = other RNA
caagtgttccagccaccggcccagggcaatgaacacaaagagcatggggggcgtgtcgaagaatgtcacaggagacctc

SEQ ID NO: 6966 - RNA, 79 nt, synthetic construct
  source 1..79: mol_type = other RNA
caagtgttccagccaccggcccagggcaatgaacacaaagagcatggggggcgtgtcgaagaatgtcacagggctcctc

SEQ ID NO: 6967 - RNA, 79 nt, synthetic construct
  source 1..79: mol_type = other RNA
caagtgttccagccaccggcccagggcaatgaacacaaagagcatggggggcgtgtcgaagaatgtcacaggcgacctc

SEQ ID NO: 6968 - RNA, 79 nt, synthetic construct
  source 1..79: mol_type = other RNA
caagtgttccagccaccggcccagggcaatgaacacaaagagcatggggggcgtgtcgaagaatgtcacaggggacctc

SEQ ID NO: 6969 - RNA, 79 nt, synthetic construct
  source 1..79: mol_type = other RNA
caagtgttccagccaccggcccagggcaatgaacacaaagagcatggggggcgtgtcgaagaatgtcacaggtgacctc

SEQ ID NO: 6970 - RNA, 80 nt, synthetic construct
  source 1..80: mol_type = other RNA
ccaagtgttccagccaccggcccagggcaatgaacacaaagagcatggggggcgtgtcgaagaatgtcacaggagacctc

SEQ ID NO: 6971 - RNA, 80 nt, synthetic construct
  source 1..80: mol_type = other RNA
ccaagtgttccagccaccggcccagggcaatgaacacaaagagcatggggggcgtgtcgaagaatgtcacaggtgacctc

SEQ ID NO: 6972 - RNA, 80 nt, synthetic construct
  source 1..80: mol_type = other RNA
ccaagtgttccagccaccggcccagggcaatgaacacaaagagcatggggggcgtgtcgaagaatgtcacaggcgacctc

SEQ ID NO: 6973 - RNA, 80 nt, synthetic construct
  source 1..80: mol_type = other RNA
ccaagtgttccagccaccggcccagggcaatgaacacaaagagcatggggggcgtgtcgaagaatgtcacagggctcctc

SEQ ID NO: 6974 - RNA, 80 nt, synthetic construct
  source 1..80: mol_type = other RNA
ccaagtgttccagccaccggcccagggcaatgaacacaaagagcatggggggcgtgtcgaagaatgtcacaggggacctc

SEQ ID NO: 6975 - RNA, 81 nt, synthetic construct
  source 1..81: mol_type = other RNA
gccaagtgttccagccaccggcccagggcaatgaacacaaagagcatggggggcgtgtcgaagaatgtcacaggggacctc

SEQ ID NO: 6976 - RNA, 81 nt, synthetic construct
  source 1..81: mol_type = other RNA
gccaagtgttccagccaccggcccagggcaatgaacacaaagagcatggggggcgtgtcgaagaatgtcacaggcgacctc

SEQ ID NO: 6977 - RNA, 81 nt, synthetic construct
  source 1..81: mol_type = other RNA
gccaagtgttccagccaccggcccagggcaatgaacacaaagagcatggggggcgtgtcgaagaatgtcacaggagacctc

SEQ ID NO: 6978 - RNA, 81 nt, synthetic construct
  source 1..81: mol_type = other RNA
gccaagtgttccagccaccggcccagggcaatgaacacaaagagcatggggggcgtgtcgaagaatgtcacaggtgacctc

SEQ ID NO: 6979 - RNA, 81 nt, synthetic construct
  source 1..81: mol_type = other RNA
gccaagtgttccagccaccggcccagggcaatgaacacaaagagcatggggggcgtgtcgaagaatgtcacagggctcctc

SEQ ID NO: 6980 - RNA, 82 nt, synthetic construct
  source 1..82: mol_type = other RNA
tgccaagtgttccagccaccggcccagggcaatgaacacaaagagcatggggggcgtgtcgaagaatgtcacagggctcctc

SEQ ID NO: 6981 - RNA, 82 nt, synthetic construct
  source 1..82: mol_type = other RNA
tgccaagtgttccagccaccggcccagggcaatgaacacaaagagcatggggggcgtgtcgaagaatgtcacaggagacctc

SEQ ID NO: 6982 - RNA, 82 nt, synthetic construct
  source 1..82: mol_type = other RNA
tgccaagtgttccagccaccggcccagggcaatgaacacaaagagcatggggggcgtgtcgaagaatgtcacaggtgacctc

SEQ ID NO: 6983 - RNA, 82 nt, synthetic construct
  source 1..82: mol_type = other RNA
tgccaagtgttccagccaccggcccagggcaatgaacacaaagagcatggggggcgtgtcgaagaatgtcacaggcgacctc

SEQ ID NO: 6984 - RNA, 82 nt, synthetic construct
  source 1..82: mol_type = other RNA
tgccaagtgttccagccaccggcccagggcaatgaacacaaagagcatggggggcgtgtcgaagaatgtcacaggggacctc

SEQ ID NO: 6985 - RNA, 83 nt, synthetic construct
  source 1..83: mol_type = other RNA
ttgccaagtgttccagccaccggcccagggcaatgaacacaaagagcatggggggcgtgtcgaagaatgtcacaggagacctc

SEQ ID NO: 6986 - RNA, 83 nt, synthetic construct
  source 1..83: mol_type = other RNA
ttgccaagtgttccagccaccggcccagggcaatgaacacaaagagcatggggggcgtgtcgaagaatgtcacaggggacctc

SEQ ID NO: 6987 - RNA, 83 nt, synthetic construct
  source 1..83: mol_type = other RNA
ttgccaagtgttccagccaccggcccagggcaatgaacacaaagagcatggggggcgtgtcgaagaatgtcacagggctcctc

SEQ ID NO: 6988 - RNA, 83 nt, synthetic construct
  source 1..83: mol_type = other RNA
ttgccaagtgttccagccaccggcccagggcaatgaacacaaagagcatggggggcgtgtcgaagaatgtcacaggcgacctc

SEQ ID NO: 6989 - RNA, 83 nt, synthetic construct
  source 1..83: mol_type = other RNA
ttgccaagtgttccagccaccggcccagggcaatgaacacaaagagcatggggggcgtgtcgaagaatgtcacaggtgacctc

SEQ ID NO: 6990 - RNA, 84 nt, synthetic construct
  source 1..84: mol_type = other RNA
tttgccaagtgttccagccaccggcccagggcaatgaacacaaagagcatggggggcgtgtcgaagaatgtcacagggctcctc

SEQ ID NO: 6991 - RNA, 84 nt, synthetic construct
  source 1..84: mol_type = other RNA
tttgccaagtgttccagccaccggcccagggcaatgaacacaaagagcatggggggcgtgtcgaagaatgtcacaggcgacctc

SEQ ID NO: 6992 - RNA, 84 nt, synthetic construct
  source 1..84: mol_type = other RNA
tttgccaagtgttccagccaccggcccagggcaatgaacacaaagagcatggggggcgtgtcgaagaatgtcacaggggacctc

SEQ ID NO: 6993 - RNA, 84 nt, synthetic construct
  source 1..84: mol_type = other RNA
tttgccaagtgttccagccaccggcccagggcaatgaacacaaagagcatggggggcgtgtcgaagaatgtcacaggtgacctc

SEQ ID NO: 6994 - RNA, 84 nt, synthetic construct
  source 1..84: mol_type = other RNA
tttgccaagtgttccagccaccggcccagggcaatgaacacaaagagcatggggggcgtgtcgaagaatgtcacaggagacctc

SEQ ID NO: 6995 - RNA, 85 nt, synthetic construct
  source 1..85: mol_type = other RNA
ctttgccaagtgttccagccaccggcccagggcaatgaacacaaagagcatggggggcgtgtcgaagaatgtcacaggcgacctc

SEQ ID NO: 6996 - RNA, 85 nt, synthetic construct
  source 1..85: mol_type = other RNA
ctttgccaagtgttccagccaccggcccagggcaatgaacacaaagagcatggggggcgtgtcgaagaatgtcacaggagacctc

SEQ ID NO: 6997 - RNA, 85 nt, synthetic construct
  source 1..85: mol_type = other RNA
ctttgccaagtgttccagccaccggcccagggcaatgaacacaaagagcatggggggcgtgtcgaagaatgtcacaggggacctc

SEQ ID NO: 6998 - RNA, 85 nt, synthetic construct
  source 1..85: mol_type = other RNA
ctttgccaagtgttccagccaccggcccagggcaatgaacacaaagagcatggggggcgtgtcgaagaatgtcacaggtgacctc

SEQ ID NO: 6999 - RNA, 85 nt, synthetic construct
  source 1..85: mol_type = other RNA
ctttgccaagtgttccagccaccggcccagggcaatgaacacaaagagcatggggggcgtgtcgaagaatgtcacagggctcctc

SEQ ID NO: 7000 - RNA, 86 nt, synthetic construct
  source 1..86: mol_type = other RNA
cctttgccaagtgttccagccaccggcccagggcaatgaacacaaagagcatggggggcgtgtcgaagaatgtcacaggggacctc

SEQ ID NO: 7001 - RNA, 86 nt, synthetic construct
  source 1..86: mol_type = other RNA
cctttgccaagtgttccagccaccggcccagggcaatgaacacaaagagcatggggggcgtgtcgaagaatgtcacaggcgacctc

SEQ ID NO: 7002 - RNA, 86 nt, synthetic construct
  source 1..86: mol_type = other RNA
cctttgccaagtgttccagccaccggcccagggcaatgaacacaaagagcatggggggcgtgtcgaagaatgtcacaggagacctc

SEQ ID NO: 7003 - RNA, 86 nt, synthetic construct
  source 1..86: mol_type = other RNA
cctttgccaagtgttccagccaccggcccagggcaatgaacacaaagagcatggggggcgtgtcgaagaatgtcacagggctcctc

SEQ ID NO: 7004 - RNA, 86 nt, synthetic construct
  source 1..86: mol_type = other RNA
cctttgccaagtgttccagccaccggcccagggcaatgaacacaaagagcatggggggcgtgtcgaagaatgtcacaggtgacctc

SEQ ID NO: 7005 - RNA, 87 nt, synthetic construct
  source 1..87: mol_type = other RNA
acctttgccaagtgttccagccaccggcccagggcaatgaacacaaagagcatggggggcgtgtcgaagaatgtcacaggcgacctc

SEQ ID NO: 7006 - RNA, 87 nt, synthetic construct
  source 1..87: mol_type = other RNA
acctttgccaagtgttccagccaccggcccagggcaatgaacacaaagagcatggggggcgtgtcgaagaatgtcacaggggacctc

SEQ ID NO: 7007 - RNA, 87 nt, synthetic construct
  source 1..87: mol_type = other RNA
acctttgccaagtgttccagccaccggcccagggcaatgaacacaaagagcatggggggcgtgtcgaagaatgtcacaggagacctc

SEQ ID NO: 7008 - RNA, 87 nt, synthetic construct
  source 1..87: mol_type = other RNA
acctttgccaagtgttccagccaccggcccagggcaatgaacacaaagagcatggggggcgtgtcgaagaatgtcacaggtgacctc

SEQ ID NO: 7009 - RNA, 87 nt, synthetic construct
  source 1..87: mol_type = other RNA
acctttgccaagtgttccagccaccggcccagggcaatgaacacaaagagcatggggggcgtgtcgaagaatgtcacagggctcctc

SEQ ID NO: 7010 - RNA, 88 nt, synthetic construct
  source 1..88: mol_type = other RNA
tacctttgccaagtgttccagccaccggcccagggcaatgaacacaaagagcatggggggcgtgtcgaagaatgtcacaggtgacctc

SEQ ID NO: 7011 - RNA, 88 nt, synthetic construct
  source 1..88: mol_type = other RNA
tacctttgccaagtgttccagccaccggcccagggcaatgaacacaaagagcatggggggcgtgtcgaagaatgtcacaggagacctc

SEQ ID NO: 7012 - RNA, 88 nt, synthetic construct
  source 1..88: mol_type = other RNA
tacctttgccaagtgttccagccaccggcccagggcaatgaacacaaagagcatggggggcgtgtcgaagaatgtcacaggggacctc

SEQ ID NO: 7013 - RNA, 88 nt, synthetic construct
  source 1..88: mol_type = other RNA
tacctttgccaagtgttccagccaccggcccagggcaatgaacacaaagagcatggggggcgtgtcgaagaatgtcacaggcgacctc

SEQ ID NO: 7014 - RNA, 88 nt, synthetic construct
  source 1..88: mol_type = other RNA
tacctttgccaagtgttccagccaccggcccagggcaatgaacacaaagagcatggggggcgtgtcgaagaatgtcacagggctcctc

SEQ ID NO: 7015 - RNA, 89 nt, synthetic construct
  source 1..89: mol_type = other RNA
ttacctttgccaagtgttccagccaccggcccagggcaatgaacacaaagagcatggggggcgtgtcgaagaatgtcacaggtgacctc

SEQ ID NO: 7016 - RNA, 89 nt, synthetic construct
  source 1..89: mol_type = other RNA
ttacctttgccaagtgttccagccaccggcccagggcaatgaacacaaagagcatggggggcgtgtcgaagaatgtcacaggggacctc

SEQ ID NO: 7017 - RNA, 89 nt, synthetic construct
  source 1..89: mol_type = other RNA
ttacctttgccaagtgttccagccaccggcccagggcaatgaacacaaagagcatggggggcgtgtcgaagaatgtcacagggctcctc

SEQ ID NO: 7018 - RNA, 89 nt, synthetic construct
  source 1..89: mol_type = other RNA
ttacctttgccaagtgttccagccaccggcccagggcaatgaacacaaagagcatggggggcgtgtcgaagaatgtcacaggcgacctc

SEQ ID NO: 7019 - RNA, 89 nt, synthetic construct
  source 1..89: mol_type = other RNA
ttacctttgccaagtgttccagccaccggcccagggcaatgaacacaaagagcatggggggcgtgtcgaagaatgtcacaggagacctc

SEQ ID NO: 7020 - RNA, 90 nt, synthetic construct
  source 1..90: mol_type = other RNA
gttacctttgccaagtgttccagccaccggcccagggcaatgaacacaaagagcatggggggcgtgtcgaagaatgtcacaggagacctc

SEQ ID NO: 7021 - RNA, 90 nt, synthetic construct
  source 1..90: mol_type = other RNA
gttacctttgccaagtgttccagccaccggcccagggcaatgaacacaaagagcatggggggcgtgtcgaagaatgtcacagggctcctc

SEQ ID NO: 7022 - RNA, 90 nt, synthetic construct
  source 1..90: mol_type = other RNA
gttacctttgccaagtgttccagccaccggcccagggcaatgaacacaaagagcatggggggcgtgtcgaagaatgtcacaggtgacctc

SEQ ID NO: 7023 - RNA, 90 nt, synthetic construct
  source 1..90: mol_type = other RNA
gttacctttgccaagtgttccagccaccggcccagggcaatgaacacaaagagcatggggggcgtgtcgaagaatgtcacaggcgacctc

SEQ ID NO: 7024 - RNA, 90 nt, synthetic construct
  source 1..90: mol_type = other RNA
gttacctttgccaagtgttccagccaccggcccagggcaatgaacacaaagagcatggggggcgtgtcgaagaatgtcacaggggacctc

SEQ ID NO: 7025 - RNA, 91 nt, synthetic construct
  source 1..91: mol_type = other RNA
tgttacctttgccaagtgttccagccaccggcccagggcaatgaacacaaagagcatggggggcgtgtcgaagaatgtcacaggagacctc

SEQ ID NO: 7026 - RNA, 91 nt, synthetic construct
  source 1..91: mol_type = other RNA
tgttacctttgccaagtgttccagccaccggcccagggcaatgaacacaaagagcatggggggcgtgtcgaagaatgtcacaggtgacctc

SEQ ID NO: 7027 - RNA, 91 nt, synthetic construct
  source 1..91: mol_type = other RNA
tgttacctttgccaagtgttccagccaccggcccagggcaatgaacacaaagagcatggggggcgtgtcgaagaatgtcacagggctcctc

SEQ ID NO: 7028 - RNA, 91 nt, synthetic construct
  source 1..91: mol_type = other RNA
tgttacctttgccaagtgttccagccaccggcccagggcaatgaacacaaagagcatggggggcgtgtcgaagaatgtcacaggcgacctc

SEQ ID NO: 7029 - RNA, 91 nt, synthetic construct
  source 1..91: mol_type = other RNA
tgttacctttgccaagtgttccagccaccggcccagggcaatgaacacaaagagcatggggggcgtgtcgaagaatgtcacaggggacctc

SEQ ID NO: 7030 - RNA, 92 nt, synthetic construct
  source 1..92: mol_type = other RNA
ctgttacctttgccaagtgttccagccaccggcccagggcaatgaacacaaagagcatggggggcgtgtcgaagaatgtcacagggctcctc

SEQ ID NO: 7031 - RNA, 92 nt, synthetic construct
  source 1..92: mol_type = other RNA
ctgttacctttgccaagtgttccagccaccggcccagggcaatgaacacaaagagcatggggggcgtgtcgaagaatgtcacaggggacctc

SEQ ID NO: 7032 - RNA, 92 nt, synthetic construct
  source 1..92: mol_type = other RNA
ctgttacctttgccaagtgttccagccaccggcccagggcaatgaacacaaagagcatggggggcgtgtcgaagaatgtcacaggcgacctc

SEQ ID NO: 7033 - RNA, 92 nt, synthetic construct
  source 1..92: mol_type = other RNA
ctgttacctttgccaagtgttccagccaccggcccagggcaatgaacacaaagagcatggggggcgtgtcgaagaatgtcacaggtgacctc

SEQ ID NO: 7034 - RNA, 92 nt, synthetic construct
  source 1..92: mol_type = other RNA
ctgttacctttgccaagtgttccagccaccggcccagggcaatgaacacaaagagcatggggggcgtgtcgaagaatgtcacaggagacctc

SEQ ID NO: 7035 - RNA, 93 nt, synthetic construct
  source 1..93: mol_type = other RNA
gctgttacctttgccaagtgttccagccaccggcccagggcaatgaacacaaagagcatggggggcgtgtcgaagaatgtcacaggcgacctc

SEQ ID NO: 7036 - RNA, 93 nt, synthetic construct
  source 1..93: mol_type = other RNA
gctgttacctttgccaagtgttccagccaccggcccagggcaatgaacacaaagagcatggggggcgtgtcgaagaatgtcacagggctcctc

SEQ ID NO: 7037 - RNA, 93 nt, synthetic construct
  source 1..93: mol_type = other RNA
gctgttacctttgccaagtgttccagccaccggcccagggcaatgaacacaaagagcatggggggcgtgtcgaagaatgtcacaggggacctc

SEQ ID NO: 7038 - RNA, 93 nt, synthetic construct
  source 1..93: mol_type = other RNA
gctgttacctttgccaagtgttccagccaccggcccagggcaatgaacacaaagagcatggggggcgtgtcgaagaatgtcacaggtgacctc

SEQ ID NO: 7039 - RNA, 93 nt, synthetic construct
  source 1..93: mol_type = other RNA
gctgttacctttgccaagtgttccagccaccggcccagggcaatgaacacaaagagcatggggggcgtgtcgaagaatgtcacaggagacctc

SEQ ID NO: 7040 - RNA, 94 nt, synthetic construct
  source 1..94: mol_type = other RNA
tgctgttacctttgccaagtgttccagccaccggcccagggcaatgaacacaaagagcatggggggcgtgtcgaagaatgtcacaggcgacctc

SEQ ID NO: 7041 - RNA, 94 nt, synthetic construct
  source 1..94: mol_type = other RNA
tgctgttacctttgccaagtgttccagccaccggcccagggcaatgaacacaaagagcatggggggcgtgtcgaagaatgtcacaggtgacctc

SEQ ID NO: 7042 - RNA, 94 nt, synthetic construct
  source 1..94: mol_type = other RNA
tgctgttacctttgccaagtgttccagccaccggcccagggcaatgaacacaaagagcatggggggcgtgtcgaagaatgtcacaggagacctc

SEQ ID NO: 7043 - RNA, 94 nt, synthetic construct
  source 1..94: mol_type = other RNA
tgctgttacctttgccaagtgttccagccaccggcccagggcaatgaacacaaagagcatggggggcgtgtcgaagaatgtcacagggctcctc

SEQ ID NO: 7044 - RNA, 94 nt, synthetic construct
  source 1..94: mol_type = other RNA
tgctgttacctttgccaagtgttccagccaccggcccagggcaatgaacacaaagagcatggggggcgtgtcgaagaatgtcacaggggacctc

SEQ ID NO: 7045 - RNA, 95 nt, synthetic construct
  source 1..95: mol_type = other RNA
ctgctgttacctttgccaagtgttccagccaccggcccagggcaatgaacacaaagagcatggggggcgtgtcgaagaatgtcacaggtgacctc

SEQ ID NO: 7046 - RNA, 95 nt, synthetic construct
  source 1..95: mol_type = other RNA
ctgctgttacctttgccaagtgttccagccaccggcccagggcaatgaacacaaagagcatggggggcgtgtcgaagaatgtcacaggcgacctc

SEQ ID NO: 7047 - RNA, 95 nt, synthetic construct
  source 1..95: mol_type = other RNA
ctgctgttacctttgccaagtgttccagccaccggcccagggcaatgaacacaaagagcatggggggcgtgtcgaagaatgtcacagggctcctc

SEQ ID NO: 7048 - RNA, 95 nt, synthetic construct
  source 1..95: mol_type = other RNA
ctgctgttacctttgccaagtgttccagccaccggcccagggcaatgaacacaaagagcatggggggcgtgtcgaagaatgtcacaggagacctc

SEQ ID NO: 7049 - RNA, 95 nt, synthetic construct
  source 1..95: mol_type = other RNA
ctgctgttacctttgccaagtgttccagccaccggcccagggcaatgaacacaaagagcatggggggcgtgtcgaagaatgtcacaggggacctc

SEQ ID NO: 7050 - RNA, 96 nt, synthetic construct
  source 1..96: mol_type = other RNA
gctgctgttacctttgccaagtgttccagccaccggcccagggcaatgaacacaaagagcatggggggcgtgtcgaagaatgtcacagggctcctc

SEQ ID NO: 7051 - RNA, 96 nt, synthetic construct
  source 1..96: mol_type = other RNA
gctgctgttacctttgccaagtgttccagccaccggcccagggcaatgaacacaaagagcatggggggcgtgtcgaagaatgtcacaggagacctc

SEQ ID NO: 7052 - RNA, 96 nt, synthetic construct
  source 1..96: mol_type = other RNA
gctgctgttacctttgccaagtgttccagccaccggcccagggcaatgaacacaaagagcatggggggcgtgtcgaagaatgtcacaggggacctc

SEQ ID NO: 7053 - RNA, 96 nt, synthetic construct
  source 1..96: mol_type = other RNA
gctgctgttacctttgccaagtgttccagccaccggcccagggcaatgaacacaaagagcatggggggcgtgtcgaagaatgtcacaggtgacctc

SEQ ID NO: 7054 - RNA, 96 nt, synthetic construct
  source 1..96: mol_type = other RNA
gctgctgttacctttgccaagtgttccagccaccggcccagggcaatgaacacaaagagcatggggggcgtgtcgaagaatgtcacaggcgacctc

SEQ ID NO: 7055 - RNA, 97 nt, synthetic construct
  source 1..97: mol_type = other RNA
agctgctgttacctttgccaagtgttccagccaccggcccagggcaatgaacacaaagagcatggggggcgtgtcgaagaatgtcacaggcgacctc

SEQ ID NO: 7056 - RNA, 97 nt, synthetic construct
  source 1..97: mol_type = other RNA
agctgctgttacctttgccaagtgttccagccaccggcccagggcaatgaacacaaagagcatggggggcgtgtcgaagaatgtcacaggggacctc

SEQ ID NO: 7057 - RNA, 97 nt, synthetic construct
  source 1..97: mol_type = other RNA
agctgctgttacctttgccaagtgttccagccaccggcccagggcaatgaacacaaagagcatggggggcgtgtcgaagaatgtcacaggagacctc

SEQ ID NO: 7058 - RNA, 97 nt, synthetic construct
  source 1..97: mol_type = other RNA
agctgctgttacctttgccaagtgttccagccaccggcccagggcaatgaacacaaagagcatggggggcgtgtcgaagaatgtcacagggctcctc

SEQ ID NO: 7059 - RNA, 97 nt, synthetic construct
  source 1..97: mol_type = other RNA
agctgctgttacctttgccaagtgttccagccaccggcccagggcaatgaacacaaagagcatggggggcgtgtcgaagaatgtcacaggtgacctc

SEQ ID NO: 7060 - RNA, 98 nt, synthetic construct
  source 1..98: mol_type = other RNA
aagctgctgttacctttgccaagtgttccagccaccggcccagggcaatgaacacaaagagcatggggggcgtgtcgaagaatgtcacaggggacctc

SEQ ID NO: 7061 - RNA, 98 nt, synthetic construct
  source 1..98: mol_type = other RNA
aagctgctgttacctttgccaagtgttccagccaccggcccagggcaatgaacacaaagagcatggggggcgtgtcgaagaatgtcacaggagacctc

SEQ ID NO: 7062 - RNA, 98 nt, synthetic construct
  source 1..98: mol_type = other RNA
aagctgctgttacctttgccaagtgttccagccaccggcccagggcaatgaacacaaagagcatggggggcgtgtcgaagaatgtcacaggcgacctc

SEQ ID NO: 7063 - RNA, 98 nt, synthetic construct
  source 1..98: mol_type = other RNA
aagctgctgttacctttgccaagtgttccagccaccggcccagggcaatgaacacaaagagcatggggggcgtgtcgaagaatgtcacagggctcctc

SEQ ID NO: 7064 - RNA, 98 nt, synthetic construct
  source 1..98: mol_type = other RNA
aagctgctgttacctttgccaagtgttccagccaccggcccagggcaatgaacacaaagagcatggggggcgtgtcgaagaatgtcacaggtgacctc

SEQ ID NO: 7065 - RNA, 99 nt, synthetic construct
  source 1..99: mol_type = other RNA
gaagctgctgttacctttgccaagtgttccagccaccggcccagggcaatgaacacaaagagcatggggggcgtgtcgaagaatgtcacaggtgacctc

SEQ ID NO: 7066 - RNA, 99 nt, synthetic construct
  source 1..99: mol_type = other RNA
gaagctgctgttacctttgccaagtgttccagccaccggcccagggcaatgaacacaaagagcatggggggcgtgtcgaagaatgtcacaggcgacctc

SEQ ID NO: 7067 - RNA, 99 nt, synthetic construct
  source 1..99: mol_type = other RNA
gaagctgctgttacctttgccaagtgttccagccaccggcccagggcaatgaacacaaagagcatggggggcgtgtcgaagaatgtcacagggctcctc

SEQ ID NO: 7068 - RNA, 99 nt, synthetic construct
  source 1..99: mol_type = other RNA
gaagctgctgttacctttgccaagtgttccagccaccggcccagggcaatgaacacaaagagcatggggggcgtgtcgaagaatgtcacaggggacctc

SEQ ID NO: 7069 - RNA, 99 nt, synthetic construct
  source 1..99: mol_type = other RNA
gaagctgctgttacctttgccaagtgttccagccaccggcccagggcaatgaacacaaagagcatggggggcgtgtcgaagaatgtcacaggagacctc

SEQ ID NO: 7070 - RNA, 100 nt, synthetic construct
  source 1..100: mol_type = other RNA
tgaagctgctgttacctttgccaagtgttccagccaccggcccagggcaatgaacacaaagagcatggggggcgtgtcgaagaatgtcacagggctcctc

SEQ ID NO: 7071 - RNA, 100 nt, synthetic construct
  source 1..100: mol_type = other RNA
tgaagctgctgttacctttgccaagtgttccagccaccggcccagggcaatgaacacaaagagcatggggggcgtgtcgaagaatgtcacaggagacctc

SEQ ID NO: 7072 - RNA, 100 nt, synthetic construct
  source 1..100: mol_type = other RNA
tgaagctgctgttacctttgccaagtgttccagccaccggcccagggcaatgaacacaaagagcatggggggcgtgtcgaagaatgtcacaggcgacctc

SEQ ID NO: 7073 - RNA, 100 nt, synthetic construct
  source 1..100: mol_type = other RNA
tgaagctgctgttacctttgccaagtgttccagccaccggcccagggcaatgaacacaaagagcatggggggcgtgtcgaagaatgtcacaggggacctc

SEQ ID NO: 7074 - RNA, 100 nt, synthetic construct
  source 1..100: mol_type = other RNA
tgaagctgctgttacctttgccaagtgttccagccaccggcccagggcaatgaacacaaagagcatggggggcgtgtcgaagaatgtcacaggtgacctc

SEQ ID NO: 7075 - RNA, 16 nt, synthetic construct
  source 1..16: mol_type = other RNA
ttctaaacatggtgtt

SEQ ID NO: 7076 - RNA, 17 nt, synthetic construct
  source 1..17: mol_type = other RNA
attctaaacatggtgtt

SEQ ID NO: 7077 - RNA, 18 nt, synthetic construct
  source 1..18: mol_type = other RNA
aattctaaacatggtgtt

SEQ ID NO: 7078 - RNA, 19 nt, synthetic construct
  source 1..19: mol_type = other RNA
taattctaaacatggtgtt

SEQ ID NO: 7079 - RNA, 20 nt, synthetic construct
  source 1..20: mol_type = other RNA
gtaattctaaacatggtgtt

SEQ ID NO: 7080 - RNA, 21 nt, synthetic construct
  source 1..21: mol_type = other RNA
agtaattctaaacatggtgtt

SEQ ID NO: 7081 - RNA, 22 nt, synthetic construct
  source 1..22: mol_type = other RNA
tagtaattctaaacatggtgtt

SEQ ID NO: 7082-7088 - skipped (7 entries)

SEQ ID NO: 7089 - RNA, 10 nt, synthetic construct
  source 1..10: mol_type = other RNA
accatgttta

SEQ ID NO: 7090 - RNA, 11 nt, synthetic construct
  source 1..11: mol_type = other RNA
accatgtttag

SEQ ID NO: 7091 - RNA, 12 nt, synthetic construct
  source 1..12: mol_type = other RNA
accatgtttaga

SEQ ID NO: 7092 - RNA, 13 nt, synthetic construct
  source 1..13: mol_type = other RNA
accatgtttagaa

SEQ ID NO: 7093 - RNA, 14 nt, synthetic construct
  source 1..14: mol_type = other RNA
accatgtttagaat

SEQ ID NO: 7094 - RNA, 15 nt, synthetic construct
  source 1..15: mol_type = other RNA
accatgtttagaatt

SEQ ID NO: 7095 - RNA, 16 nt, synthetic construct
  source 1..16: mol_type = other RNA
accatgtttagaatta

SEQ ID NO: 7096 - RNA, 17 nt, synthetic construct
  source 1..17: mol_type = other RNA
accatgtttagaattac

SEQ ID NO: 7097 - RNA, 18 nt, synthetic construct
  source 1..18: mol_type = other RNA
accatgtttagaattact

SEQ ID NO: 7098 - RNA, 19 nt, synthetic construct
  source 1..19: mol_type = other RNA
accatgtttagaattacta

SEQ ID NO: 7099 - RNA, 89 nt, synthetic construct
  source 1..89: mol_type = other RNA
ggtggctggaacacttggcaaaggtaacagcagcttcaggttcagaaaagagctgctccttcagtaaacaaatctcacttcctctgaac

SEQ ID NO: 7100 - RNA, 90 nt, synthetic construct
  source 1..90: mol_type = other RNA
cggtggctggaacacttggcaaaggtaacagcagcttcaggttcagaaaagagctgctccttcagtaaacaaatctcacttcctctgaac

SEQ ID NO: 7101 - RNA, 91 nt, synthetic construct
  source 1..91: mol_type = other RNA
ccggtggctggaacacttggcaaaggtaacagcagcttcaggttcagaaaagagctgctccttcagtaaacaaatctcacttcctctgaac

SEQ ID NO: 7102 - RNA, 92 nt, synthetic construct
  source 1..92: mol_type = other RNA
gccggtggctggaacacttggcaaaggtaacagcagcttcaggttcagaaaagagctgctccttcagtaaacaaatctcacttcctctgaac

SEQ ID NO: 7103 - RNA, 93 nt, synthetic construct
  source 1..93: mol_type = other RNA
ggccggtggctggaacacttggcaaaggtaacagcagcttcaggttcagaaaagagctgctccttcagtaaacaaatctcacttcctctgaac

SEQ ID NO: 7104 - RNA, 94 nt, synthetic construct
  source 1..94: mol_type = other RNA
gggccggtggctggaacacttggcaaaggtaacagcagcttcaggttcagaaaagagctgctccttcagtaaacaaatctcacttcctctgaac

SEQ ID NO: 7105 - RNA, 95 nt, synthetic construct
  source 1..95: mol_type = other RNA
tgggccggtggctggaacacttggcaaaggtaacagcagcttcaggttcagaaaagagctgctccttcagtaaacaaatctcacttcctctgaac

SEQ ID NO: 7106 - RNA, 96 nt, synthetic construct
  source 1..96: mol_type = other RNA
ctgggccggtggctggaacacttggcaaaggtaacagcagcttcaggttcagaaaagagctgctccttcagtaaacaaatctcacttcctctgaac

SEQ ID NO: 7107 - RNA, 97 nt, synthetic construct
  source 1..97: mol_type = other RNA
cctgggccggtggctggaacacttggcaaaggtaacagcagcttcaggttcagaaaagagctgctccttcagtaaacaaatctcacttcctctgaac

SEQ ID NO: 7108 - RNA, 98 nt, synthetic construct
  source 1..98: mol_type = other RNA
ccctgggccggtggctggaacacttggcaaaggtaacagcagcttcaggttcagaaaagagctgctccttcagtaaacaaatctcacttcctctgaac

SEQ ID NO: 7109 - RNA, 99 nt, synthetic construct
  source 1..99: mol_type = other RNA
gccctgggccggtggctggaacacttggcaaaggtaacagcagcttcaggttcagaaaagagctgctccttcagtaaacaaatctcacttcctctgaac

SEQ ID NO: 7110 - RNA, 100 nt, synthetic construct
  source 1..100: mol_type = other RNA
tgccctgggccggtggctggaacacttggcaaaggtaacagcagcttcaggttcagaaaagagctgctccttcagtaaacaaatctcacttcctctgaac

SEQ ID NO: 7111 - RNA, 20 nt, synthetic construct
  source 1..20: mol_type = other RNA
gcagcttcaggttcagaaaa

SEQ ID NO: 7112 - RNA, 20 nt, synthetic construct
  source 1..20: mol_type = other RNA
ggtggctggaacacttggca

SEQ ID NO: 7113 - RNA, 20 nt, synthetic construct
  source 1..20: mol_type = other RNA
ggaacacttggcaaaggtaa

SEQ ID NO: 7114 - RNA, 20 nt, synthetic construct
  source 1..20: mol_type = other RNA
cagcagcttcaggttcagaa

SEQ ID NO: 7115 - RNA, 20 nt, synthetic construct
  source 1..20: mol_type = other RNA
ggtaacagcagcttcaggtt

SEQ ID NO: 7116 - RNA, 20 nt, synthetic construct
  source 1..20: mol_type = other RNA
acacttggcaaaggtaacag

SEQ ID NO: 7117 - RNA, 20 nt, synthetic construct
  source 1..20: mol_type = other RNA
ggcaaaggtaacagcagctt

SEQ ID NO: 7118 - RNA, 20 nt, synthetic construct
  source 1..20: mol_type = other RNA
tcagaaaagagctgctcctt

SEQ ID NO: 7119 - RNA, 16 nt, synthetic construct
  source 1..16: mol_type = other RNA
ctaaacatggtgttca

SEQ ID NO: 7120 - RNA, 17 nt, synthetic construct
  source 1..17: mol_type = other RNA
tctaaacatggtgttca

SEQ ID NO: 7121 - RNA, 18 nt, synthetic construct
  source 1..18: mol_type = other RNA
ttctaaacatggtgttca

SEQ ID NO: 7122 - RNA, 19 nt, synthetic construct
  source 1..19: mol_type = other RNA
attctaaacatggtgttca

SEQ ID NO: 7123 - RNA, 20 nt, synthetic construct
  source 1..20: mol_type = other RNA
aattctaaacatggtgttca

SEQ ID NO: 7124 - RNA, 21 nt, synthetic construct
  source 1..21: mol_type = other RNA
taattctaaacatggtgttca

SEQ ID NO: 7125 - RNA, 22 nt, synthetic construct
  source 1..22: mol_type = other RNA
gtaattctaaacatggtgttca

SEQ ID NO: 7126-7131 - skipped (6 entries)

SEQ ID NO: 7132 - RNA, 10 nt, synthetic construct
  source 1..10: mol_type = other RNA
acaccatgtt

SEQ ID NO: 7133 - RNA, 11 nt, synthetic construct
  source 1..11: mol_type = other RNA
acaccatgttt

SEQ ID NO: 7134 - RNA, 12 nt, synthetic construct
  source 1..12: mol_type = other RNA
acaccatgttta

SEQ ID NO: 7135 - RNA, 13 nt, synthetic construct
  source 1..13: mol_type = other RNA
acaccatgtttag

SEQ ID NO: 7136 - RNA, 14 nt, synthetic construct
  source 1..14: mol_type = other RNA
acaccatgtttaga

SEQ ID NO: 7137 - RNA, 15 nt, synthetic construct
  source 1..15: mol_type = other RNA
acaccatgtttagaa

SEQ ID NO: 7138 - RNA, 16 nt, synthetic construct
  source 1..16: mol_type = other RNA
acaccatgtttagaat

SEQ ID NO: 7139 - RNA, 17 nt, synthetic construct
  source 1..17: mol_type = other RNA
acaccatgtttagaatt

SEQ ID NO: 7140 - RNA, 18 nt, synthetic construct
  source 1..18: mol_type = other RNA
acaccatgtttagaatta

SEQ ID NO: 7141 - RNA, 19 nt, synthetic construct
  source 1..19: mol_type = other RNA
acaccatgtttagaattac

SEQ ID NO: 7142 - RNA, 87 nt, synthetic construct
  source 1..87: mol_type = other RNA
ggtggctggaacacttggcaaaggtaacagcagcttcaggttcagaaaagagctgctccttcagtaaacaaatctcacttcctctga

SEQ ID NO: 7143 - RNA, 88 nt, synthetic construct
  source 1..88: mol_type = other RNA
cggtggctggaacacttggcaaaggtaacagcagcttcaggttcagaaaagagctgctccttcagtaaacaaatctcacttcctctga

SEQ ID NO: 7144 - RNA, 89 nt, synthetic construct
  source 1..89: mol_type = other RNA
ccggtggctggaacacttggcaaaggtaacagcagcttcaggttcagaaaagagctgctccttcagtaaacaaatctcacttcctctga

SEQ ID NO: 7145 - RNA, 90 nt, synthetic construct
  source 1..90: mol_type = other RNA
gccggtggctggaacacttggcaaaggtaacagcagcttcaggttcagaaaagagctgctccttcagtaaacaaatctcacttcctctga

SEQ ID NO: 7146 - RNA, 91 nt, synthetic construct
  source 1..91: mol_type = other RNA
ggccggtggctggaacacttggcaaaggtaacagcagcttcaggttcagaaaagagctgctccttcagtaaacaaatctcacttcctctga

SEQ ID NO: 7147 - RNA, 92 nt, synthetic construct
  source 1..92: mol_type = other RNA
gggccggtggctggaacacttggcaaaggtaacagcagcttcaggttcagaaaagagctgctccttcagtaaacaaatctcacttcctctga

SEQ ID NO: 7148 - RNA, 93 nt, synthetic construct
  source 1..93: mol_type = other RNA
tgggccggtggctggaacacttggcaaaggtaacagcagcttcaggttcagaaaagagctgctccttcagtaaacaaatctcacttcctctga

SEQ ID NO: 7149 - RNA, 94 nt, synthetic construct
  source 1..94: mol_type = other RNA
ctgggccggtggctggaacacttggcaaaggtaacagcagcttcaggttcagaaaagagctgctccttcagtaaacaaatctcacttcctctga

SEQ ID NO: 7150 - RNA, 95 nt, synthetic construct
  source 1..95: mol_type = other RNA
cctgggccggtggctggaacacttggcaaaggtaacagcagcttcaggttcagaaaagagctgctccttcagtaaacaaatctcacttcctctga

SEQ ID NO: 7151 - RNA, 96 nt, synthetic construct
  source 1..96: mol_type = other RNA
ccctgggccggtggctggaacacttggcaaaggtaacagcagcttcaggttcagaaaagagctgctccttcagtaaacaaatctcacttcctctga

SEQ ID NO: 7152 - RNA, 97 nt, synthetic construct
  source 1..97: mol_type = other RNA
gccctgggccggtggctggaacacttggcaaaggtaacagcagcttcaggttcagaaaagagctgctccttcagtaaacaaatctcacttcctctga

SEQ ID NO: 7153 - RNA, 98 nt, synthetic construct
  source 1..98: mol_type = other RNA
tgccctgggccggtggctggaacacttggcaaaggtaacagcagcttcaggttcagaaaagagctgctccttcagtaaacaaatctcacttcctctga

SEQ ID NO: 7154 - RNA, 99 nt, synthetic construct
  source 1..99: mol_type = other RNA
ttgccctgggccggtggctggaacacttggcaaaggtaacagcagcttcaggttcagaaaagagctgctccttcagtaaacaaatctcacttcctctga

SEQ ID NO: 7155 - RNA, 100 nt, synthetic construct
  source 1..100: mol_type = other RNA
attgccctgggccggtggctggaacacttggcaaaggtaacagcagcttcaggttcagaaaagagctgctccttcagtaaacaaatctcacttcctctga

SEQ ID NO: 7156 - RNA, 20 nt, synthetic construct
  source 1..20: mol_type = other RNA
gtgttcattgccctgggccg

SEQ ID NO: 7157 - RNA, 20 nt, synthetic construct
  source 1..20: mol_type = other RNA
tcattgccctgggccggtgg

SEQ ID NO: 7158 - RNA, 20 nt, synthetic construct
  source 1..20: mol_type = other RNA
tgctctttgtgttcattgcc

SEQ ID NO: 7159 - RNA, 20 nt, synthetic construct
  source 1..20: mol_type = other RNA
tgggccggtggctggaacac

SEQ ID NO: 7160 - RNA, 16 nt, synthetic construct
  source 1..16: mol_type = other RNA
acatggtgttcagagg

SEQ ID NO: 7161 - RNA, 17 nt, synthetic construct
  source 1..17: mol_type = other RNA
aacatggtgttcagagg

SEQ ID NO: 7162 - RNA, 18 nt, synthetic construct
  source 1..18: mol_type = other RNA
aaacatggtgttcagagg

SEQ ID NO: 7163 - RNA, 19 nt, synthetic construct
  source 1..19: mol_type = other RNA
taaacatggtgttcagagg

SEQ ID NO: 7164 - RNA, 20 nt, synthetic construct
  source 1..20: mol_type = other RNA
ctaaacatggtgttcagagg

SEQ ID NO: 7165 - RNA, 21 nt, synthetic construct
  source 1..21: mol_type = other RNA
tctaaacatggtgttcagagg

SEQ ID NO: 7166 - RNA, 22 nt, synthetic construct
  source 1..22: mol_type = other RNA
ttctaaacatggtgttcagagg

SEQ ID NO: 7167-7173 - skipped (7 entries)

SEQ ID NO: 7174 - RNA, 10 nt, synthetic construct
  source 1..10: mol_type = other RNA
ctgaacacca

SEQ ID NO: 7175 - RNA, 11 nt, synthetic construct
  source 1..11: mol_type = other RNA
ctgaacaccat

SEQ ID NO: 7176 - RNA, 12 nt, synthetic construct
  source 1..12: mol_type = other RNA
ctgaacaccatg

SEQ ID NO: 7177 - RNA, 13 nt, synthetic construct
  source 1..13: mol_type = other RNA
ctgaacaccatgt

SEQ ID NO: 7178 - RNA, 14 nt, synthetic construct
  source 1..14: mol_type = other RNA
ctgaacaccatgtt

SEQ ID NO: 7179 - RNA, 15 nt, synthetic construct
  source 1..15: mol_type = other RNA
ctgaacaccatgttt

SEQ ID NO: 7180 - RNA, 16 nt, synthetic construct
  source 1..16: mol_type = other RNA
ctgaacaccatgttta

SEQ ID NO: 7181 - RNA, 17 nt, synthetic construct
  source 1..17: mol_type = other RNA
ctgaacaccatgtttag

SEQ ID NO: 7182 - RNA, 18 nt, synthetic construct
  source 1..18: mol_type = other RNA
ctgaacaccatgtttaga

SEQ ID NO: 7183 - RNA, 19 nt, synthetic construct
  source 1..19: mol_type = other RNA
ctgaacaccatgtttagaa

SEQ ID NO: 7184 - RNA, 83 nt, synthetic construct
  source 1..83: mol_type = other RNA
ggtggctggaacacttggcaaaggtaacagcagcttcaggttcagaaaagagctgctccttcagtaaacaaatctcacttcct

SEQ ID NO: 7185 - RNA, 84 nt, synthetic construct
  source 1..84: mol_type = other RNA
cggtggctggaacacttggcaaaggtaacagcagcttcaggttcagaaaagagctgctccttcagtaaacaaatctcacttcct

SEQ ID NO: 7186 - RNA, 85 nt, synthetic construct
  source 1..85: mol_type = other RNA
ccggtggctggaacacttggcaaaggtaacagcagcttcaggttcagaaaagagctgctccttcagtaaacaaatctcacttcct

SEQ ID NO: 7187 - RNA, 86 nt, synthetic construct
  source 1..86: mol_type = other RNA
gccggtggctggaacacttggcaaaggtaacagcagcttcaggttcagaaaagagctgctccttcagtaaacaaatctcacttcct

SEQ ID NO: 7188 - RNA, 87 nt, synthetic construct
  source 1..87: mol_type = other RNA
ggccggtggctggaacacttggcaaaggtaacagcagcttcaggttcagaaaagagctgctccttcagtaaacaaatctcacttcct

SEQ ID NO: 7189 - RNA, 88 nt, synthetic construct
  source 1..88: mol_type = other RNA
gggccggtggctggaacacttggcaaaggtaacagcagcttcaggttcagaaaagagctgctccttcagtaaacaaatctcacttcct

SEQ ID NO: 7190 - RNA, 89 nt, synthetic construct
  source 1..89: mol_type = other RNA
tgggccggtggctggaacacttggcaaaggtaacagcagcttcaggttcagaaaagagctgctccttcagtaaacaaatctcacttcct

SEQ ID NO: 7191 - RNA, 90 nt, synthetic construct
  source 1..90: mol_type = other RNA
ctgggccggtggctggaacacttggcaaaggtaacagcagcttcaggttcagaaaagagctgctccttcagtaaacaaatctcacttcct

SEQ ID NO: 7192 - RNA, 91 nt, synthetic construct
  source 1..91: mol_type = other RNA
cctgggccggtggctggaacacttggcaaaggtaacagcagcttcaggttcagaaaagagctgctccttcagtaaacaaatctcacttcct

SEQ ID NO: 7193 - RNA, 92 nt, synthetic construct
  source 1..92: mol_type = other RNA
ccctgggccggtggctggaacacttggcaaaggtaacagcagcttcaggttcagaaaagagctgctccttcagtaaacaaatctcacttcct

SEQ ID NO: 7194 - RNA, 93 nt, synthetic construct
  source 1..93: mol_type = other RNA
gccctgggccggtggctggaacacttggcaaaggtaacagcagcttcaggttcagaaaagagctgctccttcagtaaacaaatctcacttcct

SEQ ID NO: 7195 - RNA, 94 nt, synthetic construct
  source 1..94: mol_type = other RNA
tgccctgggccggtggctggaacacttggcaaaggtaacagcagcttcaggttcagaaaagagctgctccttcagtaaacaaatctcacttcct

SEQ ID NO: 7196 - RNA, 95 nt, synthetic construct
  source 1..95: mol_type = other RNA
ttgccctgggccggtggctggaacacttggcaaaggtaacagcagcttcaggttcagaaaagagctgctccttcagtaaacaaatctcacttcct

SEQ ID NO: 7197 - RNA, 96 nt, synthetic construct
  source 1..96: mol_type = other RNA
attgccctgggccggtggctggaacacttggcaaaggtaacagcagcttcaggttcagaaaagagctgctccttcagtaaacaaatctcacttcct

SEQ ID NO: 7198 - RNA, 97 nt, synthetic construct
  source 1..97: mol_type = other RNA
cattgccctgggccggtggctggaacacttggcaaaggtaacagcagcttcaggttcagaaaagagctgctccttcagtaaacaaatctcacttcct

SEQ ID NO: 7199 - RNA, 98 nt, synthetic construct
  source 1..98: mol_type = other RNA
tcattgccctgggccggtggctggaacacttggcaaaggtaacagcagcttcaggttcagaaaagagctgctccttcagtaaacaaatctcacttcct

SEQ ID NO: 7200 - RNA, 99 nt, synthetic construct
  source 1..99: mol_type = other RNA
ttcattgccctgggccggtggctggaacacttggcaaaggtaacagcagcttcaggttcagaaaagagctgctccttcagtaaacaaatctcacttcct

SEQ ID NO: 7201 - RNA, 100 nt, synthetic construct
  source 1..100: mol_type = other RNA
gttcattgccctgggccggtggctggaacacttggcaaaggtaacagcagcttcaggttcagaaaagagctgctccttcagtaaacaaatctcacttcct

SEQ ID NO: 7202 - RNA, 16 nt, synthetic construct
  source 1..16: mol_type = other RNA
ggtgttcagaggaagt

SEQ ID NO: 7203 - RNA, 17 nt, synthetic construct
  source 1..17: mol_type = other RNA
tggtgttcagaggaagt

SEQ ID NO: 7204 - RNA, 18 nt, synthetic construct
  source 1..18: mol_type = other RNA
atggtgttcagaggaagt

SEQ ID NO: 7205 - RNA, 19 nt, synthetic construct
  source 1..19: mol_type = other RNA
catggtgttcagaggaagt

SEQ ID NO: 7206 - RNA, 20 nt, synthetic construct
  source 1..20: mol_type = other RNA
acatggtgttcagaggaagt

SEQ ID NO: 7207 - RNA, 21 nt, synthetic construct
  source 1..21: mol_type = other RNA
aacatggtgttcagaggaagt

SEQ ID NO: 7208 - RNA, 22 nt, synthetic construct
  source 1..22: mol_type = other RNA
aaacatggtgttcagaggaagt

SEQ ID NO: 7209-7214 - skipped (6 entries)

SEQ ID NO: 7215 - RNA, 10 nt, synthetic construct
  source 1..10: mol_type = other RNA
tcctctgaac

SEQ ID NO: 7216 - RNA, 11 nt, synthetic construct
  source 1..11: mol_type = other RNA
tcctctgaaca

SEQ ID NO: 7217 - RNA, 12 nt, synthetic construct
  source 1..12: mol_type = other RNA
tcctctgaacac

SEQ ID NO: 7218 - RNA, 13 nt, synthetic construct
  source 1..13: mol_type = other RNA
tcctctgaacacc

SEQ ID NO: 7219 - RNA, 14 nt, synthetic construct
  source 1..14: mol_type = other RNA
tcctctgaacacca

SEQ ID NO: 7220 - RNA, 15 nt, synthetic construct
  source 1..15: mol_type = other RNA
tcctctgaacaccat

SEQ ID NO: 7221 - RNA, 16 nt, synthetic construct
  source 1..16: mol_type = other RNA
tcctctgaacaccatg

SEQ ID NO: 7222 - RNA, 17 nt, synthetic construct
  source 1..17: mol_type = other RNA
tcctctgaacaccatgt

SEQ ID NO: 7223 - RNA, 18 nt, synthetic construct
  source 1..18: mol_type = other RNA
tcctctgaacaccatgtt

SEQ ID NO: 7224 - RNA, 19 nt, synthetic construct
  source 1..19: mol_type = other RNA
tcctctgaacaccatgttt

SEQ ID NO: 7225 - RNA, 79 nt, synthetic construct
  source 1..79: mol_type = other RNA
ggtggctggaacacttggcaaaggtaacagcagcttcaggttcagaaaagagctgctccttcagtaaacaaatctcact

SEQ ID NO: 7226 - RNA, 80 nt, synthetic construct
  source 1..80: mol_type = other RNA
cggtggctggaacacttggcaaaggtaacagcagcttcaggttcagaaaagagctgctccttcagtaaacaaatctcact

SEQ ID NO: 7227 - RNA, 81 nt, synthetic construct
  source 1..81: mol_type = other RNA
ccggtggctggaacacttggcaaaggtaacagcagcttcaggttcagaaaagagctgctccttcagtaaacaaatctcact

SEQ ID NO: 7228 - RNA, 82 nt, synthetic construct
  source 1..82: mol_type = other RNA
gccggtggctggaacacttggcaaaggtaacagcagcttcaggttcagaaaagagctgctccttcagtaaacaaatctcact

SEQ ID NO: 7229 - RNA, 83 nt, synthetic construct
  source 1..83: mol_type = other RNA
ggccggtggctggaacacttggcaaaggtaacagcagcttcaggttcagaaaagagctgctccttcagtaaacaaatctcact

SEQ ID NO: 7230 - RNA, 84 nt, synthetic construct
  source 1..84: mol_type = other RNA
gggccggtggctggaacacttggcaaaggtaacagcagcttcaggttcagaaaagagctgctccttcagtaaacaaatctcact

SEQ ID NO: 7231 - RNA, 85 nt, synthetic construct
  source 1..85: mol_type = other RNA
tgggccggtggctggaacacttggcaaaggtaacagcagcttcaggttcagaaaagagctgctccttcagtaaacaaatctcact

SEQ ID NO: 7232 - RNA, 86 nt, synthetic construct
  source 1..86: mol_type = other RNA
ctgggccggtggctggaacacttggcaaaggtaacagcagcttcaggttcagaaaagagctgctccttcagtaaacaaatctcact

SEQ ID NO: 7233 - RNA, 87 nt, synthetic construct
  source 1..87: mol_type = other RNA
cctgggccggtggctggaacacttggcaaaggtaacagcagcttcaggttcagaaaagagctgctccttcagtaaacaaatctcact

SEQ ID NO: 7234 - RNA, 88 nt, synthetic construct
  source 1..88: mol_type = other RNA
ccctgggccggtggctggaacacttggcaaaggtaacagcagcttcaggttcagaaaagagctgctccttcagtaaacaaatctcact

SEQ ID NO: 7235 - RNA, 89 nt, synthetic construct
  source 1..89: mol_type = other RNA
gccctgggccggtggctggaacacttggcaaaggtaacagcagcttcaggttcagaaaagagctgctccttcagtaaacaaatctcact

SEQ ID NO: 7236 - RNA, 90 nt, synthetic construct
  source 1..90: mol_type = other RNA
tgccctgggccggtggctggaacacttggcaaaggtaacagcagcttcaggttcagaaaagagctgctccttcagtaaacaaatctcact

SEQ ID NO: 7237 - RNA, 91 nt, synthetic construct
  source 1..91: mol_type = other RNA
ttgccctgggccggtggctggaacacttggcaaaggtaacagcagcttcaggttcagaaaagagctgctccttcagtaaacaaatctcact

SEQ ID NO: 7238 - RNA, 92 nt, synthetic construct
  source 1..92: mol_type = other RNA
attgccctgggccggtggctggaacacttggcaaaggtaacagcagcttcaggttcagaaaagagctgctccttcagtaaacaaatctcact

SEQ ID NO: 7239 - RNA, 93 nt, synthetic construct
  source 1..93: mol_type = other RNA
cattgccctgggccggtggctggaacacttggcaaaggtaacagcagcttcaggttcagaaaagagctgctccttcagtaaacaaatctcact

SEQ ID NO: 7240 - RNA, 94 nt, synthetic construct
  source 1..94: mol_type = other RNA
tcattgccctgggccggtggctggaacacttggcaaaggtaacagcagcttcaggttcagaaaagagctgctccttcagtaaacaaatctcact

SEQ ID NO: 7241 - RNA, 95 nt, synthetic construct
  source 1..95: mol_type = other RNA
ttcattgccctgggccggtggctggaacacttggcaaaggtaacagcagcttcaggttcagaaaagagctgctccttcagtaaacaaatctcact

SEQ ID NO: 7242 - RNA, 96 nt, synthetic construct
  source 1..96: mol_type = other RNA
gttcattgccctgggccggtggctggaacacttggcaaaggtaacagcagcttcaggttcagaaaagagctgctccttcagtaaacaaatctcact

SEQ ID NO: 7243 - RNA, 97 nt, synthetic construct
  source 1..97: mol_type = other RNA
tgttcattgccctgggccggtggctggaacacttggcaaaggtaacagcagcttcaggttcagaaaagagctgctccttcagtaaacaaatctcact

SEQ ID NO: 7244 - RNA, 98 nt, synthetic construct
  source 1..98: mol_type = other RNA
gtgttcattgccctgggccggtggctggaacacttggcaaaggtaacagcagcttcaggttcagaaaagagctgctccttcagtaaacaaatctcact

SEQ ID NO: 7245 - RNA, 99 nt, synthetic construct
  source 1..99: mol_type = other RNA
tgtgttcattgccctgggccggtggctggaacacttggcaaaggtaacagcagcttcaggttcagaaaagagctgctccttcagtaaacaaatctcact

SEQ ID NO: 7246 - RNA, 100 nt, synthetic construct
  source 1..100: mol_type = other RNA
ttgtgttcattgccctgggccggtggctggaacacttggcaaaggtaacagcagcttcaggttcagaaaagagctgctccttcagtaaacaaatctcact

SEQ ID NO: 7247 - RNA, 16 nt, synthetic construct
  source 1..16: mol_type = other RNA
tgagatttgtttactg

SEQ ID NO: 7248 - RNA, 17 nt, synthetic construct
  source 1..17: mol_type = other RNA
gtgagatttgtttactg

SEQ ID NO: 7249 - RNA, 18 nt, synthetic construct
  source 1..18: mol_type = other RNA
agtgagatttgtttactg

SEQ ID NO: 7250 - RNA, 19 nt, synthetic construct
  source 1..19: mol_type = other RNA
aagtgagatttgtttactg

SEQ ID NO: 7251 - RNA, 20 nt, synthetic construct
  source 1..20: mol_type = other RNA
gaagtgagatttgtttactg

SEQ ID NO: 7252 - RNA, 21 nt, synthetic construct
  source 1..21: mol_type = other RNA
ggaagtgagatttgtttactg

SEQ ID NO: 7253 - RNA, 22 nt, synthetic construct
  source 1..22: mol_type = other RNA
aggaagtgagatttgtttactg

SEQ ID NO: 7254-7260 - skipped (7 entries)

SEQ ID NO: 7261 - RNA, 10 nt, synthetic construct
  source 1..10: mol_type = other RNA
taaacaaatc

SEQ ID NO: 7262 - RNA, 11 nt, synthetic construct
  source 1..11: mol_type = other RNA
taaacaaatct

SEQ ID NO: 7263 - RNA, 12 nt, synthetic construct
  source 1..12: mol_type = other RNA
taaacaaatctc

SEQ ID NO: 7264 - RNA, 13 nt, synthetic construct
  source 1..13: mol_type = other RNA
taaacaaatctca

SEQ ID NO: 7265 - RNA, 14 nt, synthetic construct
  source 1..14: mol_type = other RNA
taaacaaatctcac

SEQ ID NO: 7266 - RNA, 15 nt, synthetic construct
  source 1..15: mol_type = other RNA
taaacaaatctcact

SEQ ID NO: 7267 - RNA, 16 nt, synthetic construct
  source 1..16: mol_type = other RNA
taaacaaatctcactt

SEQ ID NO: 7268 - RNA, 17 nt, synthetic construct
  source 1..17: mol_type = other RNA
taaacaaatctcacttc

SEQ ID NO: 7269 - RNA, 18 nt, synthetic construct
  source 1..18: mol_type = other RNA
taaacaaatctcacttcc

SEQ ID NO: 7270 - RNA, 19 nt, synthetic construct
  source 1..19: mol_type = other RNA
taaacaaatctcacttcct

SEQ ID NO: 7271 - RNA, 64 nt, synthetic construct
  source 1..64: mol_type = other RNA
ggtggctggaacacttggcaaaggtaacagcagcttcaggttcagaaaagagctgctccttcag

SEQ ID NO: 7272 - RNA, 65 nt, synthetic construct
  source 1..65: mol_type = other RNA
cggtggctggaacacttggcaaaggtaacagcagcttcaggttcagaaaagagctgctccttcag

SEQ ID NO: 7273 - RNA, 66 nt, synthetic construct
  source 1..66: mol_type = other RNA
ccggtggctggaacacttggcaaaggtaacagcagcttcaggttcagaaaagagctgctccttcag

SEQ ID NO: 7274 - RNA, 67 nt, synthetic construct
  source 1..67: mol_type = other RNA
gccggtggctggaacacttggcaaaggtaacagcagcttcaggttcagaaaagagctgctccttcag

SEQ ID NO: 7275 - RNA, 68 nt, synthetic construct
  source 1..68: mol_type = other RNA
ggccggtggctggaacacttggcaaaggtaacagcagcttcaggttcagaaaagagctgctccttcag

SEQ ID NO: 7276 - RNA, 69 nt, synthetic construct
  source 1..69: mol_type = other RNA
gggccggtggctggaacacttggcaaaggtaacagcagcttcaggttcagaaaagagctgctccttcag

SEQ ID NO: 7277 - RNA, 70 nt, synthetic construct
  source 1..70: mol_type = other RNA
tgggccggtggctggaacacttggcaaaggtaacagcagcttcaggttcagaaaagagctgctccttcag

SEQ ID NO: 7278 - RNA, 71 nt, synthetic construct
  source 1..71: mol_type = other RNA
ctgggccggtggctggaacacttggcaaaggtaacagcagcttcaggttcagaaaagagctgctccttcag

SEQ ID NO: 7279 - RNA, 72 nt, synthetic construct
  source 1..72: mol_type = other RNA
cctgggccggtggctggaacacttggcaaaggtaacagcagcttcaggttcagaaaagagctgctccttcag

SEQ ID NO: 7280 - RNA, 73 nt, synthetic construct
  source 1..73: mol_type = other RNA
ccctgggccggtggctggaacacttggcaaaggtaacagcagcttcaggttcagaaaagagctgctccttcag

SEQ ID NO: 7281 - RNA, 74 nt, synthetic construct
  source 1..74: mol_type = other RNA
gccctgggccggtggctggaacacttggcaaaggtaacagcagcttcaggttcagaaaagagctgctccttcag

SEQ ID NO: 7282 - RNA, 75 nt, synthetic construct
  source 1..75: mol_type = other RNA
tgccctgggccggtggctggaacacttggcaaaggtaacagcagcttcaggttcagaaaagagctgctccttcag

SEQ ID NO: 7283 - RNA, 76 nt, synthetic construct
  source 1..76: mol_type = other RNA
ttgccctgggccggtggctggaacacttggcaaaggtaacagcagcttcaggttcagaaaagagctgctccttcag

SEQ ID NO: 7284 - RNA, 77 nt, synthetic construct
  source 1..77: mol_type = other RNA
attgccctgggccggtggctggaacacttggcaaaggtaacagcagcttcaggttcagaaaagagctgctccttcag

SEQ ID NO: 7285 - RNA, 78 nt, synthetic construct
  source 1..78: mol_type = other RNA
cattgccctgggccggtggctggaacacttggcaaaggtaacagcagcttcaggttcagaaaagagctgctccttcag

SEQ ID NO: 7286 - RNA, 79 nt, synthetic construct
  source 1..79: mol_type = other RNA
tcattgccctgggccggtggctggaacacttggcaaaggtaacagcagcttcaggttcagaaaagagctgctccttcag

SEQ ID NO: 7287 - RNA, 80 nt, synthetic construct
  source 1..80: mol_type = other RNA
ttcattgccctgggccggtggctggaacacttggcaaaggtaacagcagcttcaggttcagaaaagagctgctccttcag

SEQ ID NO: 7288 - RNA, 81 nt, synthetic construct
  source 1..81: mol_type = other RNA
gttcattgccctgggccggtggctggaacacttggcaaaggtaacagcagcttcaggttcagaaaagagctgctccttcag

SEQ ID NO: 7289 - RNA, 82 nt, synthetic construct
  source 1..82: mol_type = other RNA
tgttcattgccctgggccggtggctggaacacttggcaaaggtaacagcagcttcaggttcagaaaagagctgctccttcag

SEQ ID NO: 7290 - RNA, 83 nt, synthetic construct
  source 1..83: mol_type = other RNA
gtgttcattgccctgggccggtggctggaacacttggcaaaggtaacagcagcttcaggttcagaaaagagctgctccttcag

SEQ ID NO: 7291 - RNA, 84 nt, synthetic construct
  source 1..84: mol_type = other RNA
tgtgttcattgccctgggccggtggctggaacacttggcaaaggtaacagcagcttcaggttcagaaaagagctgctccttcag

SEQ ID NO: 7292 - RNA, 85 nt, synthetic construct
  source 1..85: mol_type = other RNA
ttgtgttcattgccctgggccggtggctggaacacttggcaaaggtaacagcagcttcaggttcagaaaagagctgctccttcag

SEQ ID NO: 7293 - RNA, 86 nt, synthetic construct
  source 1..86: mol_type = other RNA
tttgtgttcattgccctgggccggtggctggaacacttggcaaaggtaacagcagcttcaggttcagaaaagagctgctccttcag

SEQ ID NO: 7294 - RNA, 87 nt, synthetic construct
  source 1..87: mol_type = other RNA
ctttgtgttcattgccctgggccggtggctggaacacttggcaaaggtaacagcagcttcaggttcagaaaagagctgctccttcag

SEQ ID NO: 7295 - RNA, 88 nt, synthetic construct
  source 1..88: mol_type = other RNA
tctttgtgttcattgccctgggccggtggctggaacacttggcaaaggtaacagcagcttcaggttcagaaaagagctgctccttcag

SEQ ID NO: 7296 - RNA, 89 nt, synthetic construct
  source 1..89: mol_type = other RNA
ctctttgtgttcattgccctgggccggtggctggaacacttggcaaaggtaacagcagcttcaggttcagaaaagagctgctccttcag

SEQ ID NO: 7297 - RNA, 90 nt, synthetic construct
  source 1..90: mol_type = other RNA
gctctttgtgttcattgccctgggccggtggctggaacacttggcaaaggtaacagcagcttcaggttcagaaaagagctgctccttcag

SEQ ID NO: 7298 - RNA, 91 nt, synthetic construct
  source 1..91: mol_type = other RNA
tgctctttgtgttcattgccctgggccggtggctggaacacttggcaaaggtaacagcagcttcaggttcagaaaagagctgctccttcag

SEQ ID NO: 7299 - RNA, 92 nt, synthetic construct
  source 1..92: mol_type = other RNA
atgctctttgtgttcattgccctgggccggtggctggaacacttggcaaaggtaacagcagcttcaggttcagaaaagagctgctccttcag

SEQ ID NO: 7300 - RNA, 93 nt, synthetic construct
  source 1..93: mol_type = other RNA
catgctctttgtgttcattgccctgggccggtggctggaacacttggcaaaggtaacagcagcttcaggttcagaaaagagctgctccttcag

SEQ ID NO: 7301 - RNA, 94 nt, synthetic construct
  source 1..94: mol_type = other RNA
ccatgctctttgtgttcattgccctgggccggtggctggaacacttggcaaaggtaacagcagcttcaggttcagaaaagagctgctccttcag

SEQ ID NO: 7302 - RNA, 95 nt, synthetic construct
  source 1..95: mol_type = other RNA
cccatgctctttgtgttcattgccctgggccggtggctggaacacttggcaaaggtaacagcagcttcaggttcagaaaagagctgctccttcag

SEQ ID NO: 7303 - RNA, 96 nt, synthetic construct
  source 1..96: mol_type = other RNA
ccccatgctctttgtgttcattgccctgggccggtggctggaacacttggcaaaggtaacagcagcttcaggttcagaaaagagctgctccttcag

SEQ ID NO: 7304 - RNA, 97 nt, synthetic construct
  source 1..97: mol_type = other RNA
cccccatgctctttgtgttcattgccctgggccggtggctggaacacttggcaaaggtaacagcagcttcaggttcagaaaagagctgctccttcag

SEQ ID NO: 7305 - RNA, 98 nt, synthetic construct
  source 1..98: mol_type = other RNA
ccccccatgctctttgtgttcattgccctgggccggtggctggaacacttggcaaaggtaacagcagcttcaggttcagaaaagagctgctccttcag

SEQ ID NO: 7306 - RNA, 99 nt, synthetic construct
  source 1..99: mol_type = other RNA
gccccccatgctctttgtgttcattgccctgggccggtggctggaacacttggcaaaggtaacagcagcttcaggttcagaaaagagctgctccttcag

SEQ ID NO: 7307 - RNA, 100 nt, synthetic construct
  source 1..100: mol_type = other RNA
cgccccccatgctctttgtgttcattgccctgggccggtggctggaacacttggcaaaggtaacagcagcttcaggttcagaaaagagctgctccttcag

SEQ ID NO: 7308 - RNA, 16 nt, synthetic construct
  source 1..16: mol_type = other RNA
gatttgtttactgaag

SEQ ID NO: 7309 - RNA, 17 nt, synthetic construct
  source 1..17: mol_type = other RNA
agatttgtttactgaag

SEQ ID NO: 7310 - RNA, 18 nt, synthetic construct
  source 1..18: mol_type = other RNA
gagatttgtttactgaag

SEQ ID NO: 7311 - RNA, 19 nt, synthetic construct
  source 1..19: mol_type = other RNA
tgagatttgtttactgaag

SEQ ID NO: 7312 - RNA, 20 nt, synthetic construct
  source 1..20: mol_type = other RNA
gtgagatttgtttactgaag

SEQ ID NO: 7313 - RNA, 21 nt, synthetic construct
  source 1..21: mol_type = other RNA
agtgagatttgtttactgaag

SEQ ID NO: 7314 - RNA, 22 nt, synthetic construct
  source 1..22: mol_type = other RNA
aagtgagatttgtttactgaag

SEQ ID NO: 7315-7320 - skipped (6 entries)

SEQ ID NO: 7321 - RNA, 10 nt, synthetic construct
  source 1..10: mol_type = other RNA
cagtaaacaa

SEQ ID NO: 7322 - RNA, 11 nt, synthetic construct
  source 1..11: mol_type = other RNA
cagtaaacaaa

SEQ ID NO: 7323 - RNA, 12 nt, synthetic construct
  source 1..12: mol_type = other RNA
cagtaaacaaat

SEQ ID NO: 7324 - RNA, 13 nt, synthetic construct
  source 1..13: mol_type = other RNA
cagtaaacaaatc

SEQ ID NO: 7325 - RNA, 14 nt, synthetic construct
  source 1..14: mol_type = other RNA
cagtaaacaaatct

SEQ ID NO: 7326 - RNA, 15 nt, synthetic construct
  source 1..15: mol_type = other RNA
cagtaaacaaatctc

SEQ ID NO: 7327 - RNA, 16 nt, synthetic construct
  source 1..16: mol_type = other RNA
cagtaaacaaatctca

SEQ ID NO: 7328 - RNA, 17 nt, synthetic construct
  source 1..17: mol_type = other RNA
cagtaaacaaatctcac

SEQ ID NO: 7329 - RNA, 18 nt, synthetic construct
  source 1..18: mol_type = other RNA
cagtaaacaaatctcact

SEQ ID NO: 7330 - RNA, 19 nt, synthetic construct
  source 1..19: mol_type = other RNA
cagtaaacaaatctcactt

SEQ ID NO: 7331 - RNA, 61 nt, synthetic construct
  source 1..61: mol_type = other RNA
ggtggctggaacacttggcaaaggtaacagcagcttcaggttcagaaaagagctgctcctt

SEQ ID NO: 7332 - RNA, 62 nt, synthetic construct
  source 1..62: mol_type = other RNA
cggtggctggaacacttggcaaaggtaacagcagcttcaggttcagaaaagagctgctcctt

SEQ ID NO: 7333 - RNA, 63 nt, synthetic construct
  source 1..63: mol_type = other RNA
ccggtggctggaacacttggcaaaggtaacagcagcttcaggttcagaaaagagctgctcctt

SEQ ID NO: 7334 - RNA, 64 nt, synthetic construct
  source 1..64: mol_type = other RNA
gccggtggctggaacacttggcaaaggtaacagcagcttcaggttcagaaaagagctgctcctt

SEQ ID NO: 7335 - RNA, 65 nt, synthetic construct
  source 1..65: mol_type = other RNA
ggccggtggctggaacacttggcaaaggtaacagcagcttcaggttcagaaaagagctgctcctt

SEQ ID NO: 7336 - RNA, 66 nt, synthetic construct
  source 1..66: mol_type = other RNA
gggccggtggctggaacacttggcaaaggtaacagcagcttcaggttcagaaaagagctgctcctt

SEQ ID NO: 7337 - RNA, 67 nt, synthetic construct
  source 1..67: mol_type = other RNA
tgggccggtggctggaacacttggcaaaggtaacagcagcttcaggttcagaaaagagctgctcctt

SEQ ID NO: 7338 - RNA, 68 nt, synthetic construct
  source 1..68: mol_type = other RNA
ctgggccggtggctggaacacttggcaaaggtaacagcagcttcaggttcagaaaagagctgctcctt

SEQ ID NO: 7339 - RNA, 69 nt, synthetic construct
  source 1..69: mol_type = other RNA
cctgggccggtggctggaacacttggcaaaggtaacagcagcttcaggttcagaaaagagctgctcctt

SEQ ID NO: 7340 - RNA, 70 nt, synthetic construct
  source 1..70: mol_type = other RNA
ccctgggccggtggctggaacacttggcaaaggtaacagcagcttcaggttcagaaaagagctgctcctt

SEQ ID NO: 7341 - RNA, 71 nt, synthetic construct
  source 1..71: mol_type = other RNA
gccctgggccggtggctggaacacttggcaaaggtaacagcagcttcaggttcagaaaagagctgctcctt

SEQ ID NO: 7342 - RNA, 72 nt, synthetic construct
  source 1..72: mol_type = other RNA
tgccctgggccggtggctggaacacttggcaaaggtaacagcagcttcaggttcagaaaagagctgctcctt

SEQ ID NO: 7343 - RNA, 73 nt, synthetic construct
  source 1..73: mol_type = other RNA
ttgccctgggccggtggctggaacacttggcaaaggtaacagcagcttcaggttcagaaaagagctgctcctt

SEQ ID NO: 7344 - RNA, 74 nt, synthetic construct
  source 1..74: mol_type = other RNA
attgccctgggccggtggctggaacacttggcaaaggtaacagcagcttcaggttcagaaaagagctgctcctt

SEQ ID NO: 7345 - RNA, 75 nt, synthetic construct
  source 1..75: mol_type = other RNA
cattgccctgggccggtggctggaacacttggcaaaggtaacagcagcttcaggttcagaaaagagctgctcctt

SEQ ID NO: 7346 - RNA, 76 nt, synthetic construct
  source 1..76: mol_type = other RNA
tcattgccctgggccggtggctggaacacttggcaaaggtaacagcagcttcaggttcagaaaagagctgctcctt

SEQ ID NO: 7347 - RNA, 77 nt, synthetic construct
  source 1..77: mol_type = other RNA
ttcattgccctgggccggtggctggaacacttggcaaaggtaacagcagcttcaggttcagaaaagagctgctcctt

SEQ ID NO: 7348 - RNA, 78 nt, synthetic construct
  source 1..78: mol_type = other RNA
gttcattgccctgggccggtggctggaacacttggcaaaggtaacagcagcttcaggttcagaaaagagctgctcctt

SEQ ID NO: 7349 - RNA, 79 nt, synthetic construct
  source 1..79: mol_type = other RNA
tgttcattgccctgggccggtggctggaacacttggcaaaggtaacagcagcttcaggttcagaaaagagctgctcctt

SEQ ID NO: 7350 - RNA, 80 nt, synthetic construct
  source 1..80: mol_type = other RNA
gtgttcattgccctgggccggtggctggaacacttggcaaaggtaacagcagcttcaggttcagaaaagagctgctcctt

SEQ ID NO: 7351 - RNA, 81 nt, synthetic construct
  source 1..81: mol_type = other RNA
tgtgttcattgccctgggccggtggctggaacacttggcaaaggtaacagcagcttcaggttcagaaaagagctgctcctt

SEQ ID NO: 7352 - RNA, 82 nt, synthetic construct
  source 1..82: mol_type = other RNA
ttgtgttcattgccctgggccggtggctggaacacttggcaaaggtaacagcagcttcaggttcagaaaagagctgctcctt

SEQ ID NO: 7353 - RNA, 83 nt, synthetic construct
  source 1..83: mol_type = other RNA
tttgtgttcattgccctgggccggtggctggaacacttggcaaaggtaacagcagcttcaggttcagaaaagagctgctcctt

SEQ ID NO: 7354 - RNA, 84 nt, synthetic construct
  source 1..84: mol_type = other RNA
ctttgtgttcattgccctgggccggtggctggaacacttggcaaaggtaacagcagcttcaggttcagaaaagagctgctcctt

SEQ ID NO: 7355 - RNA, 85 nt, synthetic construct
  source 1..85: mol_type = other RNA
tctttgtgttcattgccctgggccggtggctggaacacttggcaaaggtaacagcagcttcaggttcagaaaagagctgctcctt

SEQ ID NO: 7356 - RNA, 86 nt, synthetic construct
  source 1..86: mol_type = other RNA
ctctttgtgttcattgccctgggccggtggctggaacacttggcaaaggtaacagcagcttcaggttcagaaaagagctgctcctt

SEQ ID NO: 7357 - RNA, 87 nt, synthetic construct
  source 1..87: mol_type = other RNA
gctctttgtgttcattgccctgggccggtggctggaacacttggcaaaggtaacagcagcttcaggttcagaaaagagctgctcctt

SEQ ID NO: 7358 - RNA, 88 nt, synthetic construct
  source 1..88: mol_type = other RNA
tgctctttgtgttcattgccctgggccggtggctggaacacttggcaaaggtaacagcagcttcaggttcagaaaagagctgctcctt

SEQ ID NO: 7359 - RNA, 89 nt, synthetic construct
  source 1..89: mol_type = other RNA
atgctctttgtgttcattgccctgggccggtggctggaacacttggcaaaggtaacagcagcttcaggttcagaaaagagctgctcctt

SEQ ID NO: 7360 - RNA, 90 nt, synthetic construct
  source 1..90: mol_type = other RNA
catgctctttgtgttcattgccctgggccggtggctggaacacttggcaaaggtaacagcagcttcaggttcagaaaagagctgctcctt

SEQ ID NO: 7361 - RNA, 91 nt, synthetic construct
  source 1..91: mol_type = other RNA
ccatgctctttgtgttcattgccctgggccggtggctggaacacttggcaaaggtaacagcagcttcaggttcagaaaagagctgctcctt

SEQ ID NO: 7362 - RNA, 92 nt, synthetic construct
  source 1..92: mol_type = other RNA
cccatgctctttgtgttcattgccctgggccggtggctggaacacttggcaaaggtaacagcagcttcaggttcagaaaagagctgctcctt

SEQ ID NO: 7363 - RNA, 93 nt, synthetic construct
  source 1..93: mol_type = other RNA
ccccatgctctttgtgttcattgccctgggccggtggctggaacacttggcaaaggtaacagcagcttcaggttcagaaaagagctgctcctt

SEQ ID NO: 7364 - RNA, 94 nt, synthetic construct
  source 1..94: mol_type = other RNA
cccccatgctctttgtgttcattgccctgggccggtggctggaacacttggcaaaggtaacagcagcttcaggttcagaaaagagctgctcctt

SEQ ID NO: 7365 - RNA, 95 nt, synthetic construct
  source 1..95: mol_type = other RNA
ccccccatgctctttgtgttcattgccctgggccggtggctggaacacttggcaaaggtaacagcagcttcaggttcagaaaagagctgctcctt

SEQ ID NO: 7366 - RNA, 96 nt, synthetic construct
  source 1..96: mol_type = other RNA
gccccccatgctctttgtgttcattgccctgggccggtggctggaacacttggcaaaggtaacagcagcttcaggttcagaaaagagctgctcctt

SEQ ID NO: 7367 - RNA, 97 nt, synthetic construct
  source 1..97: mol_type = other RNA
cgccccccatgctctttgtgttcattgccctgggccggtggctggaacacttggcaaaggtaacagcagcttcaggttcagaaaagagctgctcctt

SEQ ID NO: 7368 - RNA, 98 nt, synthetic construct
  source 1..98: mol_type = other RNA
acgccccccatgctctttgtgttcattgccctgggccggtggctggaacacttggcaaaggtaacagcagcttcaggttcagaaaagagctgctcctt

SEQ ID NO: 7369 - RNA, 99 nt, synthetic construct
  source 1..99: mol_type = other RNA
cacgccccccatgctctttgtgttcattgccctgggccggtggctggaacacttggcaaaggtaacagcagcttcaggttcagaaaagagctgctcctt

SEQ ID NO: 7370 - RNA, 100 nt, synthetic construct
  source 1..100: mol_type = other RNA
acacgccccccatgctctttgtgttcattgccctgggccggtggctggaacacttggcaaaggtaacagcagcttcaggttcagaaaagagctgctcctt

SEQ ID NO: 7371 - RNA, 16 nt, synthetic construct
  source 1..16: mol_type = other RNA
ttgtttactgaaggag

SEQ ID NO: 7372 - RNA, 17 nt, synthetic construct
  source 1..17: mol_type = other RNA
tttgtttactgaaggag

SEQ ID NO: 7373 - RNA, 18 nt, synthetic construct
  source 1..18: mol_type = other RNA
atttgtttactgaaggag

SEQ ID NO: 7374 - RNA, 19 nt, synthetic construct
  source 1..19: mol_type = other RNA
gatttgtttactgaaggag

SEQ ID NO: 7375 - RNA, 20 nt, synthetic construct
  source 1..20: mol_type = other RNA
agatttgtttactgaaggag

SEQ ID NO: 7376 - RNA, 21 nt, synthetic construct
  source 1..21: mol_type = other RNA
gagatttgtttactgaaggag

SEQ ID NO: 7377 - RNA, 22 nt, synthetic construct
  source 1..22: mol_type = other RNA
tgagatttgtttactgaaggag

SEQ ID NO: 7378-7382 - skipped (5 entries)

SEQ ID NO: 7383 - RNA, 10 nt, synthetic construct
  source 1..10: mol_type = other RNA
cttcagtaaa

SEQ ID NO: 7384 - RNA, 11 nt, synthetic construct
  source 1..11: mol_type = other RNA
cttcagtaaac

SEQ ID NO: 7385 - RNA, 12 nt, synthetic construct
  source 1..12: mol_type = other RNA
cttcagtaaaca

SEQ ID NO: 7386 - RNA, 13 nt, synthetic construct
  source 1..13: mol_type = other RNA
cttcagtaaacaa

SEQ ID NO: 7387 - RNA, 14 nt, synthetic construct
  source 1..14: mol_type = other RNA
cttcagtaaacaaa

SEQ ID NO: 7388 - RNA, 15 nt, synthetic construct
  source 1..15: mol_type = other RNA
cttcagtaaacaaat

SEQ ID NO: 7389 - RNA, 16 nt, synthetic construct
  source 1..16: mol_type = other RNA
cttcagtaaacaaatc

SEQ ID NO: 7390 - RNA, 17 nt, synthetic construct
  source 1..17: mol_type = other RNA
cttcagtaaacaaatct

SEQ ID NO: 7391 - RNA, 18 nt, synthetic construct
  source 1..18: mol_type = other RNA
cttcagtaaacaaatctc

SEQ ID NO: 7392 - RNA, 19 nt, synthetic construct
  source 1..19: mol_type = other RNA
cttcagtaaacaaatctca

SEQ ID NO: 7393 - RNA, 58 nt, synthetic construct
  source 1..58: mol_type = other RNA
ggtggctggaacacttggcaaaggtaacagcagcttcaggttcagaaaagagctgctc

SEQ ID NO: 7394 - RNA, 59 nt, synthetic construct
  source 1..59: mol_type = other RNA
cggtggctggaacacttggcaaaggtaacagcagcttcaggttcagaaaagagctgctc

SEQ ID NO: 7395 - RNA, 60 nt, synthetic construct
  source 1..60: mol_type = other RNA
ccggtggctggaacacttggcaaaggtaacagcagcttcaggttcagaaaagagctgctc

SEQ ID NO: 7396 - RNA, 61 nt, synthetic construct
  source 1..61: mol_type = other RNA
gccggtggctggaacacttggcaaaggtaacagcagcttcaggttcagaaaagagctgctc

SEQ ID NO: 7397 - RNA, 62 nt, synthetic construct
  source 1..62: mol_type = other RNA
ggccggtggctggaacacttggcaaaggtaacagcagcttcaggttcagaaaagagctgctc

SEQ ID NO: 7398 - RNA, 63 nt, synthetic construct
  source 1..63: mol_type = other RNA
gggccggtggctggaacacttggcaaaggtaacagcagcttcaggttcagaaaagagctgctc

SEQ ID NO: 7399 - RNA, 64 nt, synthetic construct
  source 1..64: mol_type = other RNA
tgggccggtggctggaacacttggcaaaggtaacagcagcttcaggttcagaaaagagctgctc

SEQ ID NO: 7400 - RNA, 65 nt, synthetic construct
  source 1..65: mol_type = other RNA
ctgggccggtggctggaacacttggcaaaggtaacagcagcttcaggttcagaaaagagctgctc

SEQ ID NO: 7401 - RNA, 66 nt, synthetic construct
  source 1..66: mol_type = other RNA
cctgggccggtggctggaacacttggcaaaggtaacagcagcttcaggttcagaaaagagctgctc

SEQ ID NO: 7402 - RNA, 67 nt, synthetic construct
  source 1..67: mol_type = other RNA
ccctgggccggtggctggaacacttggcaaaggtaacagcagcttcaggttcagaaaagagctgctc

SEQ ID NO: 7403 - RNA, 68 nt, synthetic construct
  source 1..68: mol_type = other RNA
gccctgggccggtggctggaacacttggcaaaggtaacagcagcttcaggttcagaaaagagctgctc

SEQ ID NO: 7404 - RNA, 69 nt, synthetic construct
  source 1..69: mol_type = other RNA
tgccctgggccggtggctggaacacttggcaaaggtaacagcagcttcaggttcagaaaagagctgctc

SEQ ID NO: 7405 - RNA, 70 nt, synthetic construct
  source 1..70: mol_type = other RNA
ttgccctgggccggtggctggaacacttggcaaaggtaacagcagcttcaggttcagaaaagagctgctc

SEQ ID NO: 7406 - RNA, 71 nt, synthetic construct
  source 1..71: mol_type = other RNA
attgccctgggccggtggctggaacacttggcaaaggtaacagcagcttcaggttcagaaaagagctgctc

SEQ ID NO: 7407 - RNA, 72 nt, synthetic construct
  source 1..72: mol_type = other RNA
cattgccctgggccggtggctggaacacttggcaaaggtaacagcagcttcaggttcagaaaagagctgctc

SEQ ID NO: 7408 - RNA, 73 nt, synthetic construct
  source 1..73: mol_type = other RNA
tcattgccctgggccggtggctggaacacttggcaaaggtaacagcagcttcaggttcagaaaagagctgctc

SEQ ID NO: 7409 - RNA, 74 nt, synthetic construct
  source 1..74: mol_type = other RNA
ttcattgccctgggccggtggctggaacacttggcaaaggtaacagcagcttcaggttcagaaaagagctgctc

SEQ ID NO: 7410 - RNA, 75 nt, synthetic construct
  source 1..75: mol_type = other RNA
gttcattgccctgggccggtggctggaacacttggcaaaggtaacagcagcttcaggttcagaaaagagctgctc

SEQ ID NO: 7411 - RNA, 76 nt, synthetic construct
  source 1..76: mol_type = other RNA
tgttcattgccctgggccggtggctggaacacttggcaaaggtaacagcagcttcaggttcagaaaagagctgctc

SEQ ID NO: 7412 - RNA, 77 nt, synthetic construct
  source 1..77: mol_type = other RNA
gtgttcattgccctgggccggtggctggaacacttggcaaaggtaacagcagcttcaggttcagaaaagagctgctc

SEQ ID NO: 7413 - RNA, 78 nt, synthetic construct
  source 1..78: mol_type = other RNA
tgtgttcattgccctgggccggtggctggaacacttggcaaaggtaacagcagcttcaggttcagaaaagagctgctc

SEQ ID NO: 7414 - RNA, 79 nt, synthetic construct
  source 1..79: mol_type = other RNA
ttgtgttcattgccctgggccggtggctggaacacttggcaaaggtaacagcagcttcaggttcagaaaagagctgctc

SEQ ID NO: 7415 - RNA, 80 nt, synthetic construct
  source 1..80: mol_type = other RNA
tttgtgttcattgccctgggccggtggctggaacacttggcaaaggtaacagcagcttcaggttcagaaaagagctgctc

SEQ ID NO: 7416 - RNA, 81 nt, synthetic construct
  source 1..81: mol_type = other RNA
ctttgtgttcattgccctgggccggtggctggaacacttggcaaaggtaacagcagcttcaggttcagaaaagagctgctc

SEQ ID NO: 7417 - RNA, 82 nt, synthetic construct
  source 1..82: mol_type = other RNA
tctttgtgttcattgccctgggccggtggctggaacacttggcaaaggtaacagcagcttcaggttcagaaaagagctgctc

SEQ ID NO: 7418 - RNA, 83 nt, synthetic construct
  source 1..83: mol_type = other RNA
ctctttgtgttcattgccctgggccggtggctggaacacttggcaaaggtaacagcagcttcaggttcagaaaagagctgctc

SEQ ID NO: 7419 - RNA, 84 nt, synthetic construct
  source 1..84: mol_type = other RNA
gctctttgtgttcattgccctgggccggtggctggaacacttggcaaaggtaacagcagcttcaggttcagaaaagagctgctc

SEQ ID NO: 7420 - RNA, 85 nt, synthetic construct
  source 1..85: mol_type = other RNA
tgctctttgtgttcattgccctgggccggtggctggaacacttggcaaaggtaacagcagcttcaggttcagaaaagagctgctc

SEQ ID NO: 7421 - RNA, 86 nt, synthetic construct
  source 1..86: mol_type = other RNA
atgctctttgtgttcattgccctgggccggtggctggaacacttggcaaaggtaacagcagcttcaggttcagaaaagagctgctc

SEQ ID NO: 7422 - RNA, 87 nt, synthetic construct
  source 1..87: mol_type = other RNA
catgctctttgtgttcattgccctgggccggtggctggaacacttggcaaaggtaacagcagcttcaggttcagaaaagagctgctc

SEQ ID NO: 7423 - RNA, 88 nt, synthetic construct
  source 1..88: mol_type = other RNA
ccatgctctttgtgttcattgccctgggccggtggctggaacacttggcaaaggtaacagcagcttcaggttcagaaaagagctgctc

SEQ ID NO: 7424 - RNA, 89 nt, synthetic construct
  source 1..89: mol_type = other RNA
cccatgctctttgtgttcattgccctgggccggtggctggaacacttggcaaaggtaacagcagcttcaggttcagaaaagagctgctc

SEQ ID NO: 7425 - RNA, 90 nt, synthetic construct
  source 1..90: mol_type = other RNA
ccccatgctctttgtgttcattgccctgggccggtggctggaacacttggcaaaggtaacagcagcttcaggttcagaaaagagctgctc

SEQ ID NO: 7426 - RNA, 91 nt, synthetic construct
  source 1..91: mol_type = other RNA
cccccatgctctttgtgttcattgccctgggccggtggctggaacacttggcaaaggtaacagcagcttcaggttcagaaaagagctgctc

SEQ ID NO: 7427 - RNA, 92 nt, synthetic construct
  source 1..92: mol_type = other RNA
ccccccatgctctttgtgttcattgccctgggccggtggctggaacacttggcaaaggtaacagcagcttcaggttcagaaaagagctgctc

SEQ ID NO: 7428 - RNA, 93 nt, synthetic construct
  source 1..93: mol_type = other RNA
gccccccatgctctttgtgttcattgccctgggccggtggctggaacacttggcaaaggtaacagcagcttcaggttcagaaaagagctgctc

SEQ ID NO: 7429 - RNA, 94 nt, synthetic construct
  source 1..94: mol_type = other RNA
cgccccccatgctctttgtgttcattgccctgggccggtggctggaacacttggcaaaggtaacagcagcttcaggttcagaaaagagctgctc

SEQ ID NO: 7430 - RNA, 95 nt, synthetic construct
  source 1..95: mol_type = other RNA
acgccccccatgctctttgtgttcattgccctgggccggtggctggaacacttggcaaaggtaacagcagcttcaggttcagaaaagagctgctc

SEQ ID NO: 7431 - RNA, 96 nt, synthetic construct
  source 1..96: mol_type = other RNA
cacgccccccatgctctttgtgttcattgccctgggccggtggctggaacacttggcaaaggtaacagcagcttcaggttcagaaaagagctgctc

SEQ ID NO: 7432 - RNA, 97 nt, synthetic construct
  source 1..97: mol_type = other RNA
acacgccccccatgctctttgtgttcattgccctgggccggtggctggaacacttggcaaaggtaacagcagcttcaggttcagaaaagagctgctc

SEQ ID NO: 7433 - RNA, 98 nt, synthetic construct
  source 1..98: mol_type = other RNA
gacacgccccccatgctctttgtgttcattgccctgggccggtggctggaacacttggcaaaggtaacagcagcttcaggttcagaaaagagctgctc

SEQ ID NO: 7434 - RNA, 99 nt, synthetic construct
  source 1..99: mol_type = other RNA
cgacacgccccccatgctctttgtgttcattgccctgggccggtggctggaacacttggcaaaggtaacagcagcttcaggttcagaaaagagctgctc

SEQ ID NO: 7435 - RNA, 100 nt, synthetic construct
  source 1..100: mol_type = other RNA
tcgacacgccccccatgctctttgtgttcattgccctgggccggtggctggaacacttggcaaaggtaacagcagcttcaggttcagaaaagagctgctc

SEQ ID NO: 7436 - RNA, 16 nt, synthetic construct
  source 1..16: mol_type = other RNA
ctcttttctgaacctg

SEQ ID NO: 7437 - RNA, 17 nt, synthetic construct
  source 1..17: mol_type = other RNA
gctcttttctgaacctg

SEQ ID NO: 7438 - RNA, 18 nt, synthetic construct
  source 1..18: mol_type = other RNA
agctcttttctgaacctg

SEQ ID NO: 7439 - RNA, 19 nt, synthetic construct
  source 1..19: mol_type = other RNA
cagctcttttctgaacctg

SEQ ID NO: 7440 - RNA, 20 nt, synthetic construct
  source 1..20: mol_type = other RNA
gcagctcttttctgaacctg

SEQ ID NO: 7441 - RNA, 21 nt, synthetic construct
  source 1..21: mol_type = other RNA
agcagctcttttctgaacctg

SEQ ID NO: 7442 - RNA, 22 nt, synthetic construct
  source 1..22: mol_type = other RNA
gagcagctcttttctgaacctg

SEQ ID NO: 7443-7449 - skipped (7 entries)

SEQ ID NO: 7450 - RNA, 10 nt, synthetic construct
  source 1..10: mol_type = other RNA
gttcagaaaa

SEQ ID NO: 7451 - RNA, 11 nt, synthetic construct
  source 1..11: mol_type = other RNA
gttcagaaaag

SEQ ID NO: 7452 - RNA, 12 nt, synthetic construct
  source 1..12: mol_type = other RNA
gttcagaaaaga

SEQ ID NO: 7453 - RNA, 13 nt, synthetic construct
  source 1..13: mol_type = other RNA
gttcagaaaagag

SEQ ID NO: 7454 - RNA, 14 nt, synthetic construct
  source 1..14: mol_type = other RNA
gttcagaaaagagc

SEQ ID NO: 7455 - RNA, 15 nt, synthetic construct
  source 1..15: mol_type = other RNA
gttcagaaaagagct

SEQ ID NO: 7456 - RNA, 16 nt, synthetic construct
  source 1..16: mol_type = other RNA
gttcagaaaagagctg

SEQ ID NO: 7457 - RNA, 17 nt, synthetic construct
  source 1..17: mol_type = other RNA
gttcagaaaagagctgc

SEQ ID NO: 7458 - RNA, 18 nt, synthetic construct
  source 1..18: mol_type = other RNA
gttcagaaaagagctgct

SEQ ID NO: 7459 - RNA, 19 nt, synthetic construct
  source 1..19: mol_type = other RNA
gttcagaaaagagctgctc

SEQ ID NO: 7460 - RNA, 39 nt, synthetic construct
  source 1..39: mol_type = other RNA
ggtggctggaacacttggcaaaggtaacagcagcttcag

SEQ ID NO: 7461 - RNA, 40 nt, synthetic construct
  source 1..40: mol_type = other RNA
cggtggctggaacacttggcaaaggtaacagcagcttcag

SEQ ID NO: 7462 - RNA, 41 nt, synthetic construct
  source 1..41: mol_type = other RNA
ccggtggctggaacacttggcaaaggtaacagcagcttcag

SEQ ID NO: 7463 - RNA, 42 nt, synthetic construct
  source 1..42: mol_type = other RNA
gccggtggctggaacacttggcaaaggtaacagcagcttcag

SEQ ID NO: 7464 - RNA, 43 nt, synthetic construct
  source 1..43: mol_type = other RNA
ggccggtggctggaacacttggcaaaggtaacagcagcttcag

SEQ ID NO: 7465 - RNA, 44 nt, synthetic construct
  source 1..44: mol_type = other RNA
gggccggtggctggaacacttggcaaaggtaacagcagcttcag

SEQ ID NO: 7466 - RNA, 45 nt, synthetic construct
  source 1..45: mol_type = other RNA
tgggccggtggctggaacacttggcaaaggtaacagcagcttcag

SEQ ID NO: 7467 - RNA, 46 nt, synthetic construct
  source 1..46: mol_type = other RNA
ctgggccggtggctggaacacttggcaaaggtaacagcagcttcag

SEQ ID NO: 7468 - RNA, 47 nt, synthetic construct
  source 1..47: mol_type = other RNA
cctgggccggtggctggaacacttggcaaaggtaacagcagcttcag

SEQ ID NO: 7469 - RNA, 48 nt, synthetic construct
  source 1..48: mol_type = other RNA
ccctgggccggtggctggaacacttggcaaaggtaacagcagcttcag

SEQ ID NO: 7470 - RNA, 49 nt, synthetic construct
  source 1..49: mol_type = other RNA
gccctgggccggtggctggaacacttggcaaaggtaacagcagcttcag

SEQ ID NO: 7471 - RNA, 50 nt, synthetic construct
  source 1..50: mol_type = other RNA
tgccctgggccggtggctggaacacttggcaaaggtaacagcagcttcag

SEQ ID NO: 7472 - RNA, 51 nt, synthetic construct
  source 1..51: mol_type = other RNA
ttgccctgggccggtggctggaacacttggcaaaggtaacagcagcttcag

SEQ ID NO: 7473 - RNA, 52 nt, synthetic construct
  source 1..52: mol_type = other RNA
attgccctgggccggtggctggaacacttggcaaaggtaacagcagcttcag

SEQ ID NO: 7474 - RNA, 53 nt, synthetic construct
  source 1..53: mol_type = other RNA
cattgccctgggccggtggctggaacacttggcaaaggtaacagcagcttcag

SEQ ID NO: 7475 - RNA, 54 nt, synthetic construct
  source 1..54: mol_type = other RNA
tcattgccctgggccggtggctggaacacttggcaaaggtaacagcagcttcag

SEQ ID NO: 7476 - RNA, 55 nt, synthetic construct
  source 1..55: mol_type = other RNA
ttcattgccctgggccggtggctggaacacttggcaaaggtaacagcagcttcag

SEQ ID NO: 7477 - RNA, 56 nt, synthetic construct
  source 1..56: mol_type = other RNA
gttcattgccctgggccggtggctggaacacttggcaaaggtaacagcagcttcag

SEQ ID NO: 7478 - RNA, 57 nt, synthetic construct
  source 1..57: mol_type = other RNA
tgttcattgccctgggccggtggctggaacacttggcaaaggtaacagcagcttcag

SEQ ID NO: 7479 - RNA, 58 nt, synthetic construct
  source 1..58: mol_type = other RNA
gtgttcattgccctgggccggtggctggaacacttggcaaaggtaacagcagcttcag

SEQ ID NO: 7480 - RNA, 59 nt, synthetic construct
  source 1..59: mol_type = other RNA
tgtgttcattgccctgggccggtggctggaacacttggcaaaggtaacagcagcttcag

SEQ ID NO: 7481 - RNA, 60 nt, synthetic construct
  source 1..60: mol_type = other RNA
ttgtgttcattgccctgggccggtggctggaacacttggcaaaggtaacagcagcttcag

SEQ ID NO: 7482 - RNA, 61 nt, synthetic construct
  source 1..61: mol_type = other RNA
tttgtgttcattgccctgggccggtggctggaacacttggcaaaggtaacagcagcttcag

SEQ ID NO: 7483 - RNA, 62 nt, synthetic construct
  source 1..62: mol_type = other RNA
ctttgtgttcattgccctgggccggtggctggaacacttggcaaaggtaacagcagcttcag

SEQ ID NO: 7484 - RNA, 63 nt, synthetic construct
  source 1..63: mol_type = other RNA
tctttgtgttcattgccctgggccggtggctggaacacttggcaaaggtaacagcagcttcag

SEQ ID NO: 7485 - RNA, 64 nt, synthetic construct
  source 1..64: mol_type = other RNA
ctctttgtgttcattgccctgggccggtggctggaacacttggcaaaggtaacagcagcttcag

SEQ ID NO: 7486 - RNA, 65 nt, synthetic construct
  source 1..65: mol_type = other RNA
gctctttgtgttcattgccctgggccggtggctggaacacttggcaaaggtaacagcagcttcag

SEQ ID NO: 7487 - RNA, 66 nt, synthetic construct
  source 1..66: mol_type = other RNA
tgctctttgtgttcattgccctgggccggtggctggaacacttggcaaaggtaacagcagcttcag

SEQ ID NO: 7488 - RNA, 67 nt, synthetic construct
  source 1..67: mol_type = other RNA
atgctctttgtgttcattgccctgggccggtggctggaacacttggcaaaggtaacagcagcttcag

SEQ ID NO: 7489 - RNA, 68 nt, synthetic construct
  source 1..68: mol_type = other RNA
catgctctttgtgttcattgccctgggccggtggctggaacacttggcaaaggtaacagcagcttcag

SEQ ID NO: 7490 - RNA, 69 nt, synthetic construct
  source 1..69: mol_type = other RNA
ccatgctctttgtgttcattgccctgggccggtggctggaacacttggcaaaggtaacagcagcttcag

SEQ ID NO: 7491 - RNA, 70 nt, synthetic construct
  source 1..70: mol_type = other RNA
cccatgctctttgtgttcattgccctgggccggtggctggaacacttggcaaaggtaacagcagcttcag

SEQ ID NO: 7492 - RNA, 71 nt, synthetic construct
  source 1..71: mol_type = other RNA
ccccatgctctttgtgttcattgccctgggccggtggctggaacacttggcaaaggtaacagcagcttcag

SEQ ID NO: 7493 - RNA, 72 nt, synthetic construct
  source 1..72: mol_type = other RNA
cccccatgctctttgtgttcattgccctgggccggtggctggaacacttggcaaaggtaacagcagcttcag

SEQ ID NO: 7494 - RNA, 73 nt, synthetic construct
  source 1..73: mol_type = other RNA
ccccccatgctctttgtgttcattgccctgggccggtggctggaacacttggcaaaggtaacagcagcttcag

SEQ ID NO: 7495 - RNA, 74 nt, synthetic construct
  source 1..74: mol_type = other RNA
gccccccatgctctttgtgttcattgccctgggccggtggctggaacacttggcaaaggtaacagcagcttcag

SEQ ID NO: 7496 - RNA, 75 nt, synthetic construct
  source 1..75: mol_type = other RNA
cgccccccatgctctttgtgttcattgccctgggccggtggctggaacacttggcaaaggtaacagcagcttcag

SEQ ID NO: 7497 - RNA, 76 nt, synthetic construct
  source 1..76: mol_type = other RNA
acgccccccatgctctttgtgttcattgccctgggccggtggctggaacacttggcaaaggtaacagcagcttcag

SEQ ID NO: 7498 - RNA, 77 nt, synthetic construct
  source 1..77: mol_type = other RNA
cacgccccccatgctctttgtgttcattgccctgggccggtggctggaacacttggcaaaggtaacagcagcttcag

SEQ ID NO: 7499 - RNA, 78 nt, synthetic construct
  source 1..78: mol_type = other RNA
acacgccccccatgctctttgtgttcattgccctgggccggtggctggaacacttggcaaaggtaacagcagcttcag

SEQ ID NO: 7500 - RNA, 79 nt, synthetic construct
  source 1..79: mol_type = other RNA
gacacgccccccatgctctttgtgttcattgccctgggccggtggctggaacacttggcaaaggtaacagcagcttcag

SEQ ID NO: 7501 - RNA, 80 nt, synthetic construct
  source 1..80: mol_type = other RNA
cgacacgccccccatgctctttgtgttcattgccctgggccggtggctggaacacttggcaaaggtaacagcagcttcag

SEQ ID NO: 7502 - RNA, 81 nt, synthetic construct
  source 1..81: mol_type = other RNA
tcgacacgccccccatgctctttgtgttcattgccctgggccggtggctggaacacttggcaaaggtaacagcagcttcag

SEQ ID NO: 7503 - RNA, 82 nt, synthetic construct
  source 1..82: mol_type = other RNA
ttcgacacgccccccatgctctttgtgttcattgccctgggccggtggctggaacacttggcaaaggtaacagcagcttcag

SEQ ID NO: 7504 - RNA, 83 nt, synthetic construct
  source 1..83: mol_type = other RNA
cttcgacacgccccccatgctctttgtgttcattgccctgggccggtggctggaacacttggcaaaggtaacagcagcttcag

SEQ ID NO: 7505 - RNA, 84 nt, synthetic construct
  source 1..84: mol_type = other RNA
tcttcgacacgccccccatgctctttgtgttcattgccctgggccggtggctggaacacttggcaaaggtaacagcagcttcag

SEQ ID NO: 7506 - RNA, 85 nt, synthetic construct
  source 1..85: mol_type = other RNA
ttcttcgacacgccccccatgctctttgtgttcattgccctgggccggtggctggaacacttggcaaaggtaacagcagcttcag

SEQ ID NO: 7507 - RNA, 86 nt, synthetic construct
  source 1..86: mol_type = other RNA
attcttcgacacgccccccatgctctttgtgttcattgccctgggccggtggctggaacacttggcaaaggtaacagcagcttcag

SEQ ID NO: 7508 - RNA, 87 nt, synthetic construct
  source 1..87: mol_type = other RNA
cattcttcgacacgccccccatgctctttgtgttcattgccctgggccggtggctggaacacttggcaaaggtaacagcagcttcag

SEQ ID NO: 7509 - RNA, 88 nt, synthetic construct
  source 1..88: mol_type = other RNA
acattcttcgacacgccccccatgctctttgtgttcattgccctgggccggtggctggaacacttggcaaaggtaacagcagcttcag

SEQ ID NO: 7510 - RNA, 89 nt, synthetic construct
  source 1..89: mol_type = other RNA
gacattcttcgacacgccccccatgctctttgtgttcattgccctgggccggtggctggaacacttggcaaaggtaacagcagcttcag

SEQ ID NO: 7511 - RNA, 90 nt, synthetic construct
  source 1..90: mol_type = other RNA
tgacattcttcgacacgccccccatgctctttgtgttcattgccctgggccggtggctggaacacttggcaaaggtaacagcagcttcag

SEQ ID NO: 7512 - RNA, 91 nt, synthetic construct
  source 1..91: mol_type = other RNA
gtgacattcttcgacacgccccccatgctctttgtgttcattgccctgggccggtggctggaacacttggcaaaggtaacagcagcttcag

SEQ ID NO: 7513 - RNA, 92 nt, synthetic construct
  source 1..92: mol_type = other RNA
tgtgacattcttcgacacgccccccatgctctttgtgttcattgccctgggccggtggctggaacacttggcaaaggtaacagcagcttcag

SEQ ID NO: 7514 - RNA, 93 nt, synthetic construct
  source 1..93: mol_type = other RNA
ctgtgacattcttcgacacgccccccatgctctttgtgttcattgccctgggccggtggctggaacacttggcaaaggtaacagcagcttcag

SEQ ID NO: 7515 - RNA, 94 nt, synthetic construct
  source 1..94: mol_type = other RNA
cctgtgacattcttcgacacgccccccatgctctttgtgttcattgccctgggccggtggctggaacacttggcaaaggtaacagcagcttcag

SEQ ID NO: 7516 - RNA, 95 nt, synthetic construct
  source 1..95: mol_type = other RNA
ccctgtgacattcttcgacacgccccccatgctctttgtgttcattgccctgggccggtggctggaacacttggcaaaggtaacagcagcttcag

SEQ ID NO: 7517 - RNA, 96 nt, synthetic construct
  source 1..96: mol_type = other RNA
gccctgtgacattcttcgacacgccccccatgctctttgtgttcattgccctgggccggtggctggaacacttggcaaaggtaacagcagcttcag

SEQ ID NO: 7518 - RNA, 97 nt, synthetic construct
  source 1..97: mol_type = other RNA
agccctgtgacattcttcgacacgccccccatgctctttgtgttcattgccctgggccggtggctggaacacttggcaaaggtaacagcagcttcag

SEQ ID NO: 7519 - RNA, 98 nt, synthetic construct
  source 1..98: mol_type = other RNA
gagccctgtgacattcttcgacacgccccccatgctctttgtgttcattgccctgggccggtggctggaacacttggcaaaggtaacagcagcttcag

SEQ ID NO: 7520 - RNA, 99 nt, synthetic construct
  source 1..99: mol_type = other RNA
ggagccctgtgacattcttcgacacgccccccatgctctttgtgttcattgccctgggccggtggctggaacacttggcaaaggtaacagcagcttcag

SEQ ID NO: 7521 - RNA, 100 nt, synthetic construct
  source 1..100: mol_type = other RNA
aggagccctgtgacattcttcgacacgccccccatgctctttgtgttcattgccctgggccggtggctggaacacttggcaaaggtaacagcagcttcag

SEQ ID NO: 7522 - RNA, 16 nt, synthetic construct
  source 1..16: mol_type = other RNA
tgctgttacctttgcc

SEQ ID NO: 7523 - RNA, 17 nt, synthetic construct
  source 1..17: mol_type = other RNA
ctgctgttacctttgcc

SEQ ID NO: 7524 - RNA, 18 nt, synthetic construct
  source 1..18: mol_type = other RNA
gctgctgttacctttgcc

SEQ ID NO: 7525 - RNA, 19 nt, synthetic construct
  source 1..19: mol_type = other RNA
agctgctgttacctttgcc

SEQ ID NO: 7526 - RNA, 20 nt, synthetic construct
  source 1..20: mol_type = other RNA
aagctgctgttacctttgcc

SEQ ID NO: 7527 - RNA, 21 nt, synthetic construct
  source 1..21: mol_type = other RNA
gaagctgctgttacctttgcc

SEQ ID NO: 7528 - RNA, 22 nt, synthetic construct
  source 1..22: mol_type = other RNA
tgaagctgctgttacctttgcc

SEQ ID NO: 7529-7535 - skipped (7 entries)

SEQ ID NO: 7536 - RNA, 10 nt, synthetic construct
  source 1..10: mol_type = other RNA
aaaggtaaca

SEQ ID NO: 7537 - RNA, 11 nt, synthetic construct
  source 1..11: mol_type = other RNA
aaaggtaacag

SEQ ID NO: 7538 - RNA, 12 nt, synthetic construct
  source 1..12: mol_type = other RNA
aaaggtaacagc

SEQ ID NO: 7539 - RNA, 13 nt, synthetic construct
  source 1..13: mol_type = other RNA
aaaggtaacagca

SEQ ID NO: 7540 - RNA, 14 nt, synthetic construct
  source 1..14: mol_type = other RNA
aaaggtaacagcag

SEQ ID NO: 7541 - RNA, 15 nt, synthetic construct
  source 1..15: mol_type = other RNA
aaaggtaacagcagc

SEQ ID NO: 7542 - RNA, 16 nt, synthetic construct
  source 1..16: mol_type = other RNA
aaaggtaacagcagct

SEQ ID NO: 7543 - RNA, 17 nt, synthetic construct
  source 1..17: mol_type = other RNA
aaaggtaacagcagctt

SEQ ID NO: 7544 - RNA, 18 nt, synthetic construct
  source 1..18: mol_type = other RNA
aaaggtaacagcagcttc

SEQ ID NO: 7545 - RNA, 19 nt, synthetic construct
  source 1..19: mol_type = other RNA
aaaggtaacagcagcttca

SEQ ID NO: 7546 - RNA, 19 nt, synthetic construct
  source 1..19: mol_type = other RNA
ggtggctggaacatcttgc

SEQ ID NO: 7547 - RNA, 19 nt, synthetic construct
  source 1..19: mol_type = other RNA
ggtggctggaacacttggc

SEQ ID NO: 7548 - RNA, 19 nt, synthetic construct
  source 1..19: mol_type = other RNA
ggtggctggaacatttggc

SEQ ID NO: 7549 - RNA, 19 nt, synthetic construct
  source 1..19: mol_type = other RNA
ggtggctggaacatctggc

SEQ ID NO: 7550 - RNA, 19 nt, synthetic construct
  source 1..19: mol_type = other RNA
ggtggctggaacacctggc

SEQ ID NO: 7551 - RNA, 19 nt, synthetic construct
  source 1..19: mol_type = other RNA
ggtggctggaacacctagc

SEQ ID NO: 7552 - RNA, 19 nt, synthetic construct
  source 1..19: mol_type = other RNA
ggtggctggaacaccttgc

SEQ ID NO: 7553 - RNA, 19 nt, synthetic construct
  source 1..19: mol_type = other RNA
ggtggctggaacacctcgc

SEQ ID NO: 7554 - RNA, 19 nt, synthetic construct
  source 1..19: mol_type = other RNA
ggtggctggaacatctcgc

SEQ ID NO: 7555 - RNA, 19 nt, synthetic construct
  source 1..19: mol_type = other RNA
ggtggctggaacatctagc

SEQ ID NO: 7556 - RNA, 20 nt, synthetic construct
  source 1..20: mol_type = other RNA
cggtggctggaacatctagc

SEQ ID NO: 7557 - RNA, 20 nt, synthetic construct
  source 1..20: mol_type = other RNA
cggtggctggaacacctggc

SEQ ID NO: 7558 - RNA, 20 nt, synthetic construct
  source 1..20: mol_type = other RNA
cggtggctggaacacttggc

SEQ ID NO: 7559 - RNA, 20 nt, synthetic construct
  source 1..20: mol_type = other RNA
cggtggctggaacacctcgc

SEQ ID NO: 7560 - RNA, 20 nt, synthetic construct
  source 1..20: mol_type = other RNA
cggtggctggaacacctagc

SEQ ID NO: 7561 - RNA, 20 nt, synthetic construct
  source 1..20: mol_type = other RNA
cggtggctggaacatcttgc

SEQ ID NO: 7562 - RNA, 20 nt, synthetic construct
  source 1..20: mol_type = other RNA
cggtggctggaacatttggc

SEQ ID NO: 7563 - RNA, 20 nt, synthetic construct
  source 1..20: mol_type = other RNA
cggtggctggaacaccttgc

SEQ ID NO: 7564 - RNA, 20 nt, synthetic construct
  source 1..20: mol_type = other RNA
cggtggctggaacatctggc

SEQ ID NO: 7565 - RNA, 20 nt, synthetic construct
  source 1..20: mol_type = other RNA
cggtggctggaacatctcgc

SEQ ID NO: 7566 - RNA, 21 nt, synthetic construct
  source 1..21: mol_type = other RNA
ccggtggctggaacacctggc

SEQ ID NO: 7567 - RNA, 21 nt, synthetic construct
  source 1..21: mol_type = other RNA
ccggtggctggaacatctcgc

SEQ ID NO: 7568 - RNA, 21 nt, synthetic construct
  source 1..21: mol_type = other RNA
ccggtggctggaacacctcgc

SEQ ID NO: 7569 - RNA, 21 nt, synthetic construct
  source 1..21: mol_type = other RNA
ccggtggctggaacatcttgc

SEQ ID NO: 7570 - RNA, 21 nt, synthetic construct
  source 1..21: mol_type = other RNA
ccggtggctggaacacctagc

SEQ ID NO: 7571 - RNA, 21 nt, synthetic construct
  source 1..21: mol_type = other RNA
ccggtggctggaacatctggc

SEQ ID NO: 7572 - RNA, 21 nt, synthetic construct
  source 1..21: mol_type = other RNA
ccggtggctggaacaccttgc

SEQ ID NO: 7573 - RNA, 21 nt, synthetic construct
  source 1..21: mol_type = other RNA
ccggtggctggaacatctagc

SEQ ID NO: 7574 - RNA, 21 nt, synthetic construct
  source 1..21: mol_type = other RNA
ccggtggctggaacacttggc

SEQ ID NO: 7575 - RNA, 21 nt, synthetic construct
  source 1..21: mol_type = other RNA
ccggtggctggaacatttggc

SEQ ID NO: 7576 - RNA, 22 nt, synthetic construct
  source 1..22: mol_type = other RNA
gccggtggctggaacaccttgc

SEQ ID NO: 7577 - RNA, 22 nt, synthetic construct
  source 1..22: mol_type = other RNA
gccggtggctggaacatttggc

SEQ ID NO: 7578 - RNA, 22 nt, synthetic construct
  source 1..22: mol_type = other RNA
gccggtggctggaacatctggc

SEQ ID NO: 7579 - RNA, 22 nt, synthetic construct
  source 1..22: mol_type = other RNA
gccggtggctggaacacctcgc

SEQ ID NO: 7580 - RNA, 22 nt, synthetic construct
  source 1..22: mol_type = other RNA
gccggtggctggaacacctggc

SEQ ID NO: 7581 - RNA, 22 nt, synthetic construct
  source 1..22: mol_type = other RNA
gccggtggctggaacatctcgc

SEQ ID NO: 7582 - RNA, 22 nt, synthetic construct
  source 1..22: mol_type = other RNA
gccggtggctggaacatctagc

SEQ ID NO: 7583 - RNA, 22 nt, synthetic construct
  source 1..22: mol_type = other RNA
gccggtggctggaacacctagc

SEQ ID NO: 7584 - RNA, 22 nt, synthetic construct
  source 1..22: mol_type = other RNA
gccggtggctggaacatcttgc

SEQ ID NO: 7585 - RNA, 22 nt, synthetic construct
  source 1..22: mol_type = other RNA
gccggtggctggaacacttggc

SEQ ID NO: 7586 - RNA, 23 nt, synthetic construct
  source 1..23: mol_type = other RNA
ggccggtggctggaacatctagc

SEQ ID NO: 7587 - RNA, 23 nt, synthetic construct
  source 1..23: mol_type = other RNA
ggccggtggctggaacaccttgc

SEQ ID NO: 7588 - RNA, 23 nt, synthetic construct
  source 1..23: mol_type = other RNA
ggccggtggctggaacacctggc

SEQ ID NO: 7589 - RNA, 23 nt, synthetic construct
  source 1..23: mol_type = other RNA
ggccggtggctggaacacctagc

SEQ ID NO: 7590 - RNA, 23 nt, synthetic construct
  source 1..23: mol_type = other RNA
ggccggtggctggaacatctcgc

SEQ ID NO: 7591 - RNA, 23 nt, synthetic construct
  source 1..23: mol_type = other RNA
ggccggtggctggaacatttggc

SEQ ID NO: 7592 - RNA, 23 nt, synthetic construct
  source 1..23: mol_type = other RNA
ggccggtggctggaacatctggc

SEQ ID NO: 7593 - RNA, 23 nt, synthetic construct
  source 1..23: mol_type = other RNA
ggccggtggctggaacacctcgc

SEQ ID NO: 7594 - RNA, 23 nt, synthetic construct
  source 1..23: mol_type = other RNA
ggccggtggctggaacacttggc

SEQ ID NO: 7595 - RNA, 23 nt, synthetic construct
  source 1..23: mol_type = other RNA
ggccggtggctggaacatcttgc

SEQ ID NO: 7596 - RNA, 24 nt, synthetic construct
  source 1..24: mol_type = other RNA
gggccggtggctggaacatctcgc

SEQ ID NO: 7597 - RNA, 24 nt, synthetic construct
  source 1..24: mol_type = other RNA
gggccggtggctggaacacctggc

SEQ ID NO: 7598 - RNA, 24 nt, synthetic construct
  source 1..24: mol_type = other RNA
gggccggtggctggaacatttggc

SEQ ID NO: 7599 - RNA, 24 nt, synthetic construct
  source 1..24: mol_type = other RNA
gggccggtggctggaacaccttgc

SEQ ID NO: 7600 - RNA, 24 nt, synthetic construct
  source 1..24: mol_type = other RNA
gggccggtggctggaacacctcgc

SEQ ID NO: 7601 - RNA, 24 nt, synthetic construct
  source 1..24: mol_type = other RNA
gggccggtggctggaacatctagc

SEQ ID NO: 7602 - RNA, 24 nt, synthetic construct
  source 1..24: mol_type = other RNA
gggccggtggctggaacatcttgc

SEQ ID NO: 7603 - RNA, 24 nt, synthetic construct
  source 1..24: mol_type = other RNA
gggccggtggctggaacacctagc

SEQ ID NO: 7604 - RNA, 24 nt, synthetic construct
  source 1..24: mol_type = other RNA
gggccggtggctggaacatctggc

SEQ ID NO: 7605 - RNA, 24 nt, synthetic construct
  source 1..24: mol_type = other RNA
gggccggtggctggaacacttggc

SEQ ID NO: 7606 - RNA, 25 nt, synthetic construct
  source 1..25: mol_type = other RNA
tgggccggtggctggaacacctagc

SEQ ID NO: 7607 - RNA, 25 nt, synthetic construct
  source 1..25: mol_type = other RNA
tgggccggtggctggaacacttggc

SEQ ID NO: 7608 - RNA, 25 nt, synthetic construct
  source 1..25: mol_type = other RNA
tgggccggtggctggaacatctcgc

SEQ ID NO: 7609 - RNA, 25 nt, synthetic construct
  source 1..25: mol_type = other RNA
tgggccggtggctggaacaccttgc

SEQ ID NO: 7610 - RNA, 25 nt, synthetic construct
  source 1..25: mol_type = other RNA
tgggccggtggctggaacatttggc

SEQ ID NO: 7611 - RNA, 25 nt, synthetic construct
  source 1..25: mol_type = other RNA
tgggccggtggctggaacatctggc

SEQ ID NO: 7612 - RNA, 25 nt, synthetic construct
  source 1..25: mol_type = other RNA
tgggccggtggctggaacatctagc

SEQ ID NO: 7613 - RNA, 25 nt, synthetic construct
  source 1..25: mol_type = other RNA
tgggccggtggctggaacacctcgc

SEQ ID NO: 7614 - RNA, 25 nt, synthetic construct
  source 1..25: mol_type = other RNA
tgggccggtggctggaacacctggc

SEQ ID NO: 7615 - RNA, 25 nt, synthetic construct
  source 1..25: mol_type = other RNA
tgggccggtggctggaacatcttgc

SEQ ID NO: 7616 - RNA, 26 nt, synthetic construct
  source 1..26: mol_type = other RNA
ctgggccggtggctggaacatcttgc

SEQ ID NO: 7617 - RNA, 26 nt, synthetic construct
  source 1..26: mol_type = other RNA
ctgggccggtggctggaacaccttgc

SEQ ID NO: 7618 - RNA, 26 nt, synthetic construct
  source 1..26: mol_type = other RNA
ctgggccggtggctggaacacctcgc

SEQ ID NO: 7619 - RNA, 26 nt, synthetic construct
  source 1..26: mol_type = other RNA
ctgggccggtggctggaacatctagc

SEQ ID NO: 7620 - RNA, 26 nt, synthetic construct
  source 1..26: mol_type = other RNA
ctgggccggtggctggaacacttggc

SEQ ID NO: 7621 - RNA, 26 nt, synthetic construct
  source 1..26: mol_type = other RNA
ctgggccggtggctggaacacctagc

SEQ ID NO: 7622 - RNA, 26 nt, synthetic construct
  source 1..26: mol_type = other RNA
ctgggccggtggctggaacatctcgc

SEQ ID NO: 7623 - RNA, 26 nt, synthetic construct
  source 1..26: mol_type = other RNA
ctgggccggtggctggaacatttggc

SEQ ID NO: 7624 - RNA, 26 nt, synthetic construct
  source 1..26: mol_type = other RNA
ctgggccggtggctggaacatctggc

SEQ ID NO: 7625 - RNA, 26 nt, synthetic construct
  source 1..26: mol_type = other RNA
ctgggccggtggctggaacacctggc

SEQ ID NO: 7626 - RNA, 27 nt, synthetic construct
  source 1..27: mol_type = other RNA
cctgggccggtggctggaacacctggc

SEQ ID NO: 7627 - RNA, 27 nt, synthetic construct
  source 1..27: mol_type = other RNA
cctgggccggtggctggaacacctagc

SEQ ID NO: 7628 - RNA, 27 nt, synthetic construct
  source 1..27: mol_type = other RNA
cctgggccggtggctggaacatctagc

SEQ ID NO: 7629 - RNA, 27 nt, synthetic construct
  source 1..27: mol_type = other RNA
cctgggccggtggctggaacatttggc

SEQ ID NO: 7630 - RNA, 27 nt, synthetic construct
  source 1..27: mol_type = other RNA
cctgggccggtggctggaacacctcgc

SEQ ID NO: 7631 - RNA, 27 nt, synthetic construct
  source 1..27: mol_type = other RNA
cctgggccggtggctggaacaccttgc

SEQ ID NO: 7632 - RNA, 27 nt, synthetic construct
  source 1..27: mol_type = other RNA
cctgggccggtggctggaacacttggc

SEQ ID NO: 7633 - RNA, 27 nt, synthetic construct
  source 1..27: mol_type = other RNA
cctgggccggtggctggaacatctggc

SEQ ID NO: 7634 - RNA, 27 nt, synthetic construct
  source 1..27: mol_type = other RNA
cctgggccggtggctggaacatcttgc

SEQ ID NO: 7635 - RNA, 27 nt, synthetic construct
  source 1..27: mol_type = other RNA
cctgggccggtggctggaacatctcgc

SEQ ID NO: 7636 - RNA, 28 nt, synthetic construct
  source 1..28: mol_type = other RNA
ccctgggccggtggctggaacacctggc

SEQ ID NO: 7637 - RNA, 28 nt, synthetic construct
  source 1..28: mol_type = other RNA
ccctgggccggtggctggaacatcttgc

SEQ ID NO: 7638 - RNA, 28 nt, synthetic construct
  source 1..28: mol_type = other RNA
ccctgggccggtggctggaacatctcgc

SEQ ID NO: 7639 - RNA, 28 nt, synthetic construct
  source 1..28: mol_type = other RNA
ccctgggccggtggctggaacacctagc

SEQ ID NO: 7640 - RNA, 28 nt, synthetic construct
  source 1..28: mol_type = other RNA
ccctgggccggtggctggaacatctggc

SEQ ID NO: 7641 - RNA, 28 nt, synthetic construct
  source 1..28: mol_type = other RNA
ccctgggccggtggctggaacacctcgc

SEQ ID NO: 7642 - RNA, 28 nt, synthetic construct
  source 1..28: mol_type = other RNA
ccctgggccggtggctggaacaccttgc

SEQ ID NO: 7643 - RNA, 28 nt, synthetic construct
  source 1..28: mol_type = other RNA
ccctgggccggtggctggaacatctagc

SEQ ID NO: 7644 - RNA, 28 nt, synthetic construct
  source 1..28: mol_type = other RNA
ccctgggccggtggctggaacacttggc

SEQ ID NO: 7645 - RNA, 28 nt, synthetic construct
  source 1..28: mol_type = other RNA
ccctgggccggtggctggaacatttggc

SEQ ID NO: 7646 - RNA, 29 nt, synthetic construct
  source 1..29: mol_type = other RNA
gccctgggccggtggctggaacatcttgc

SEQ ID NO: 7647 - RNA, 29 nt, synthetic construct
  source 1..29: mol_type = other RNA
gccctgggccggtggctggaacatctcgc

SEQ ID NO: 7648 - RNA, 29 nt, synthetic construct
  source 1..29: mol_type = other RNA
gccctgggccggtggctggaacaccttgc

SEQ ID NO: 7649 - RNA, 29 nt, synthetic construct
  source 1..29: mol_type = other RNA
gccctgggccggtggctggaacacctggc

SEQ ID NO: 7650 - RNA, 29 nt, synthetic construct
  source 1..29: mol_type = other RNA
gccctgggccggtggctggaacatctggc

SEQ ID NO: 7651 - RNA, 29 nt, synthetic construct
  source 1..29: mol_type = other RNA
gccctgggccggtggctggaacacctagc

SEQ ID NO: 7652 - RNA, 29 nt, synthetic construct
  source 1..29: mol_type = other RNA
gccctgggccggtggctggaacatctagc

SEQ ID NO: 7653 - RNA, 29 nt, synthetic construct
  source 1..29: mol_type = other RNA
gccctgggccggtggctggaacacttggc

SEQ ID NO: 7654 - RNA, 29 nt, synthetic construct
  source 1..29: mol_type = other RNA
gccctgggccggtggctggaacatttggc

SEQ ID NO: 7655 - RNA, 29 nt, synthetic construct
  source 1..29: mol_type = other RNA
gccctgggccggtggctggaacacctcgc

SEQ ID NO: 7656 - RNA, 30 nt, synthetic construct
  source 1..30: mol_type = other RNA
tgccctgggccggtggctggaacatctagc

SEQ ID NO: 7657 - RNA, 30 nt, synthetic construct
  source 1..30: mol_type = other RNA
tgccctgggccggtggctggaacatctggc

SEQ ID NO: 7658 - RNA, 30 nt, synthetic construct
  source 1..30: mol_type = other RNA
tgccctgggccggtggctggaacatctcgc

SEQ ID NO: 7659 - RNA, 30 nt, synthetic construct
  source 1..30: mol_type = other RNA
tgccctgggccggtggctggaacacttggc

SEQ ID NO: 7660 - RNA, 30 nt, synthetic construct
  source 1..30: mol_type = other RNA
tgccctgggccggtggctggaacacctcgc

SEQ ID NO: 7661 - RNA, 30 nt, synthetic construct
  source 1..30: mol_type = other RNA
tgccctgggccggtggctggaacaccttgc

SEQ ID NO: 7662 - RNA, 30 nt, synthetic construct
  source 1..30: mol_type = other RNA
tgccctgggccggtggctggaacacctggc

SEQ ID NO: 7663 - RNA, 30 nt, synthetic construct
  source 1..30: mol_type = other RNA
tgccctgggccggtggctggaacatcttgc

SEQ ID NO: 7664 - RNA, 30 nt, synthetic construct
  source 1..30: mol_type = other RNA
tgccctgggccggtggctggaacacctagc

SEQ ID NO: 7665 - RNA, 30 nt, synthetic construct
  source 1..30: mol_type = other RNA
tgccctgggccggtggctggaacatttggc

SEQ ID NO: 7666 - RNA, 31 nt, synthetic construct
  source 1..31: mol_type = other RNA
ttgccctgggccggtggctggaacatctagc

SEQ ID NO: 7667 - RNA, 31 nt, synthetic construct
  source 1..31: mol_type = other RNA
ttgccctgggccggtggctggaacatctggc

SEQ ID NO: 7668 - RNA, 31 nt, synthetic construct
  source 1..31: mol_type = other RNA
ttgccctgggccggtggctggaacatctcgc

SEQ ID NO: 7669 - RNA, 31 nt, synthetic construct
  source 1..31: mol_type = other RNA
ttgccctgggccggtggctggaacacctggc

SEQ ID NO: 7670 - RNA, 31 nt, synthetic construct
  source 1..31: mol_type = other RNA
ttgccctgggccggtggctggaacacctcgc

SEQ ID NO: 7671 - RNA, 31 nt, synthetic construct
  source 1..31: mol_type = other RNA
ttgccctgggccggtggctggaacacttggc

SEQ ID NO: 7672 - RNA, 31 nt, synthetic construct
  source 1..31: mol_type = other RNA
ttgccctgggccggtggctggaacaccttgc

SEQ ID NO: 7673 - RNA, 31 nt, synthetic construct
  source 1..31: mol_type = other RNA
ttgccctgggccggtggctggaacacctagc

SEQ ID NO: 7674 - RNA, 31 nt, synthetic construct
  source 1..31: mol_type = other RNA
ttgccctgggccggtggctggaacatcttgc

SEQ ID NO: 7675 - RNA, 31 nt, synthetic construct
  source 1..31: mol_type = other RNA
ttgccctgggccggtggctggaacatttggc

SEQ ID NO: 7676 - RNA, 32 nt, synthetic construct
  source 1..32: mol_type = other RNA
attgccctgggccggtggctggaacatcttgc

SEQ ID NO: 7677 - RNA, 32 nt, synthetic construct
  source 1..32: mol_type = other RNA
attgccctgggccggtggctggaacaccttgc

SEQ ID NO: 7678 - RNA, 32 nt, synthetic construct
  source 1..32: mol_type = other RNA
attgccctgggccggtggctggaacacctagc

SEQ ID NO: 7679 - RNA, 32 nt, synthetic construct
  source 1..32: mol_type = other RNA
attgccctgggccggtggctggaacatttggc

SEQ ID NO: 7680 - RNA, 32 nt, synthetic construct
  source 1..32: mol_type = other RNA
attgccctgggccggtggctggaacatctcgc

SEQ ID NO: 7681 - RNA, 32 nt, synthetic construct
  source 1..32: mol_type = other RNA
attgccctgggccggtggctggaacacttggc

SEQ ID NO: 7682 - RNA, 32 nt, synthetic construct
  source 1..32: mol_type = other RNA
attgccctgggccggtggctggaacacctggc

SEQ ID NO: 7683 - RNA, 32 nt, synthetic construct
  source 1..32: mol_type = other RNA
attgccctgggccggtggctggaacatctggc

SEQ ID NO: 7684 - RNA, 32 nt, synthetic construct
  source 1..32: mol_type = other RNA
attgccctgggccggtggctggaacatctagc

SEQ ID NO: 7685 - RNA, 32 nt, synthetic construct
  source 1..32: mol_type = other RNA
attgccctgggccggtggctggaacacctcgc

SEQ ID NO: 7686 - RNA, 33 nt, synthetic construct
  source 1..33: mol_type = other RNA
cattgccctgggccggtggctggaacacttggc

SEQ ID NO: 7687 - RNA, 33 nt, synthetic construct
  source 1..33: mol_type = other RNA
cattgccctgggccggtggctggaacatctcgc

SEQ ID NO: 7688 - RNA, 33 nt, synthetic construct
  source 1..33: mol_type = other RNA
cattgccctgggccggtggctggaacatttggc

SEQ ID NO: 7689 - RNA, 33 nt, synthetic construct
  source 1..33: mol_type = other RNA
cattgccctgggccggtggctggaacacctcgc

SEQ ID NO: 7690 - RNA, 33 nt, synthetic construct
  source 1..33: mol_type = other RNA
cattgccctgggccggtggctggaacatctagc

SEQ ID NO: 7691 - RNA, 33 nt, synthetic construct
  source 1..33: mol_type = other RNA
cattgccctgggccggtggctggaacacctggc

SEQ ID NO: 7692 - RNA, 33 nt, synthetic construct
  source 1..33: mol_type = other RNA
cattgccctgggccggtggctggaacatctggc

SEQ ID NO: 7693 - RNA, 33 nt, synthetic construct
  source 1..33: mol_type = other RNA
cattgccctgggccggtggctggaacacctagc

SEQ ID NO: 7694 - RNA, 33 nt, synthetic construct
  source 1..33: mol_type = other RNA
cattgccctgggccggtggctggaacatcttgc

SEQ ID NO: 7695 - RNA, 33 nt, synthetic construct
  source 1..33: mol_type = other RNA
cattgccctgggccggtggctggaacaccttgc

SEQ ID NO: 7696 - RNA, 34 nt, synthetic construct
  source 1..34: mol_type = other RNA
tcattgccctgggccggtggctggaacacttggc

SEQ ID NO: 7697 - RNA, 34 nt, synthetic construct
  source 1..34: mol_type = other RNA
tcattgccctgggccggtggctggaacatctagc

SEQ ID NO: 7698 - RNA, 34 nt, synthetic construct
  source 1..34: mol_type = other RNA
tcattgccctgggccggtggctggaacatctcgc

SEQ ID NO: 7699 - RNA, 34 nt, synthetic construct
  source 1..34: mol_type = other RNA
tcattgccctgggccggtggctggaacacctagc

SEQ ID NO: 7700 - RNA, 34 nt, synthetic construct
  source 1..34: mol_type = other RNA
tcattgccctgggccggtggctggaacatctggc

SEQ ID NO: 7701 - RNA, 34 nt, synthetic construct
  source 1..34: mol_type = other RNA
tcattgccctgggccggtggctggaacacctggc

SEQ ID NO: 7702 - RNA, 34 nt, synthetic construct
  source 1..34: mol_type = other RNA
tcattgccctgggccggtggctggaacacctcgc

SEQ ID NO: 7703 - RNA, 34 nt, synthetic construct
  source 1..34: mol_type = other RNA
tcattgccctgggccggtggctggaacatttggc

SEQ ID NO: 7704 - RNA, 34 nt, synthetic construct
  source 1..34: mol_type = other RNA
tcattgccctgggccggtggctggaacatcttgc

SEQ ID NO: 7705 - RNA, 34 nt, synthetic construct
  source 1..34: mol_type = other RNA
tcattgccctgggccggtggctggaacaccttgc

SEQ ID NO: 7706 - RNA, 35 nt, synthetic construct
  source 1..35: mol_type = other RNA
ttcattgccctgggccggtggctggaacacctagc

SEQ ID NO: 7707 - RNA, 35 nt, synthetic construct
  source 1..35: mol_type = other RNA
ttcattgccctgggccggtggctggaacatctggc

SEQ ID NO: 7708 - RNA, 35 nt, synthetic construct
  source 1..35: mol_type = other RNA
ttcattgccctgggccggtggctggaacacttggc

SEQ ID NO: 7709 - RNA, 35 nt, synthetic construct
  source 1..35: mol_type = other RNA
ttcattgccctgggccggtggctggaacatcttgc

SEQ ID NO: 7710 - RNA, 35 nt, synthetic construct
  source 1..35: mol_type = other RNA
ttcattgccctgggccggtggctggaacacctcgc

SEQ ID NO: 7711 - RNA, 35 nt, synthetic construct
  source 1..35: mol_type = other RNA
ttcattgccctgggccggtggctggaacatctcgc

SEQ ID NO: 7712 - RNA, 35 nt, synthetic construct
  source 1..35: mol_type = other RNA
ttcattgccctgggccggtggctggaacacctggc

SEQ ID NO: 7713 - RNA, 35 nt, synthetic construct
  source 1..35: mol_type = other RNA
ttcattgccctgggccggtggctggaacatctagc

SEQ ID NO: 7714 - RNA, 35 nt, synthetic construct
  source 1..35: mol_type = other RNA
ttcattgccctgggccggtggctggaacatttggc

SEQ ID NO: 7715 - RNA, 35 nt, synthetic construct
  source 1..35: mol_type = other RNA
ttcattgccctgggccggtggctggaacaccttgc

SEQ ID NO: 7716 - RNA, 36 nt, synthetic construct
  source 1..36: mol_type = other RNA
gttcattgccctgggccggtggctggaacacttggc

SEQ ID NO: 7717 - RNA, 36 nt, synthetic construct
  source 1..36: mol_type = other RNA
gttcattgccctgggccggtggctggaacatttggc

SEQ ID NO: 7718 - RNA, 36 nt, synthetic construct
  source 1..36: mol_type = other RNA
gttcattgccctgggccggtggctggaacacctggc

SEQ ID NO: 7719 - RNA, 36 nt, synthetic construct
  source 1..36: mol_type = other RNA
gttcattgccctgggccggtggctggaacaccttgc

SEQ ID NO: 7720 - RNA, 36 nt, synthetic construct
  source 1..36: mol_type = other RNA
gttcattgccctgggccggtggctggaacatctcgc

SEQ ID NO: 7721 - RNA, 36 nt, synthetic construct
  source 1..36: mol_type = other RNA
gttcattgccctgggccggtggctggaacacctagc

SEQ ID NO: 7722 - RNA, 36 nt, synthetic construct
  source 1..36: mol_type = other RNA
gttcattgccctgggccggtggctggaacatctagc

SEQ ID NO: 7723 - RNA, 36 nt, synthetic construct
  source 1..36: mol_type = other RNA
gttcattgccctgggccggtggctggaacatcttgc

SEQ ID NO: 7724 - RNA, 36 nt, synthetic construct
  source 1..36: mol_type = other RNA
gttcattgccctgggccggtggctggaacacctcgc

SEQ ID NO: 7725 - RNA, 36 nt, synthetic construct
  source 1..36: mol_type = other RNA
gttcattgccctgggccggtggctggaacatctggc

SEQ ID NO: 7726 - RNA, 37 nt, synthetic construct
  source 1..37: mol_type = other RNA
tgttcattgccctgggccggtggctggaacatctcgc

SEQ ID NO: 7727 - RNA, 37 nt, synthetic construct
  source 1..37: mol_type = other RNA
tgttcattgccctgggccggtggctggaacacctggc

SEQ ID NO: 7728 - RNA, 37 nt, synthetic construct
  source 1..37: mol_type = other RNA
tgttcattgccctgggccggtggctggaacatcttgc

SEQ ID NO: 7729 - RNA, 37 nt, synthetic construct
  source 1..37: mol_type = other RNA
tgttcattgccctgggccggtggctggaacacctagc

SEQ ID NO: 7730 - RNA, 37 nt, synthetic construct
  source 1..37: mol_type = other RNA
tgttcattgccctgggccggtggctggaacatctagc

SEQ ID NO: 7731 - RNA, 37 nt, synthetic construct
  source 1..37: mol_type = other RNA
tgttcattgccctgggccggtggctggaacaccttgc

SEQ ID NO: 7732 - RNA, 37 nt, synthetic construct
  source 1..37: mol_type = other RNA
tgttcattgccctgggccggtggctggaacatttggc

SEQ ID NO: 7733 - RNA, 37 nt, synthetic construct
  source 1..37: mol_type = other RNA
tgttcattgccctgggccggtggctggaacatctggc

SEQ ID NO: 7734 - RNA, 37 nt, synthetic construct
  source 1..37: mol_type = other RNA
tgttcattgccctgggccggtggctggaacacctcgc

SEQ ID NO: 7735 - RNA, 37 nt, synthetic construct
  source 1..37: mol_type = other RNA
tgttcattgccctgggccggtggctggaacacttggc

SEQ ID NO: 7736 - RNA, 38 nt, synthetic construct
  source 1..38: mol_type = other RNA
gtgttcattgccctgggccggtggctggaacaccttgc

SEQ ID NO: 7737 - RNA, 38 nt, synthetic construct
  source 1..38: mol_type = other RNA
gtgttcattgccctgggccggtggctggaacacttggc

SEQ ID NO: 7738 - RNA, 38 nt, synthetic construct
  source 1..38: mol_type = other RNA
gtgttcattgccctgggccggtggctggaacatctcgc

SEQ ID NO: 7739 - RNA, 38 nt, synthetic construct
  source 1..38: mol_type = other RNA
gtgttcattgccctgggccggtggctggaacacctcgc

SEQ ID NO: 7740 - RNA, 38 nt, synthetic construct
  source 1..38: mol_type = other RNA
gtgttcattgccctgggccggtggctggaacacctagc

SEQ ID NO: 7741 - RNA, 38 nt, synthetic construct
  source 1..38: mol_type = other RNA
gtgttcattgccctgggccggtggctggaacatcttgc

SEQ ID NO: 7742 - RNA, 38 nt, synthetic construct
  source 1..38: mol_type = other RNA
gtgttcattgccctgggccggtggctggaacatctagc

SEQ ID NO: 7743 - RNA, 38 nt, synthetic construct
  source 1..38: mol_type = other RNA
gtgttcattgccctgggccggtggctggaacatctggc

SEQ ID NO: 7744 - RNA, 38 nt, synthetic construct
  source 1..38: mol_type = other RNA
gtgttcattgccctgggccggtggctggaacatttggc

SEQ ID NO: 7745 - RNA, 38 nt, synthetic construct
  source 1..38: mol_type = other RNA
gtgttcattgccctgggccggtggctggaacacctggc

SEQ ID NO: 7746 - RNA, 39 nt, synthetic construct
  source 1..39: mol_type = other RNA
tgtgttcattgccctgggccggtggctggaacatctagc

SEQ ID NO: 7747 - RNA, 39 nt, synthetic construct
  source 1..39: mol_type = other RNA
tgtgttcattgccctgggccggtggctggaacacctagc

SEQ ID NO: 7748 - RNA, 39 nt, synthetic construct
  source 1..39: mol_type = other RNA
tgtgttcattgccctgggccggtggctggaacacctggc

SEQ ID NO: 7749 - RNA, 39 nt, synthetic construct
  source 1..39: mol_type = other RNA
tgtgttcattgccctgggccggtggctggaacatctggc

SEQ ID NO: 7750 - RNA, 39 nt, synthetic construct
  source 1..39: mol_type = other RNA
tgtgttcattgccctgggccggtggctggaacatttggc

SEQ ID NO: 7751 - RNA, 39 nt, synthetic construct
  source 1..39: mol_type = other RNA
tgtgttcattgccctgggccggtggctggaacatctcgc

SEQ ID NO: 7752 - RNA, 39 nt, synthetic construct
  source 1..39: mol_type = other RNA
tgtgttcattgccctgggccggtggctggaacatcttgc

SEQ ID NO: 7753 - RNA, 39 nt, synthetic construct
  source 1..39: mol_type = other RNA
tgtgttcattgccctgggccggtggctggaacacctcgc

SEQ ID NO: 7754 - RNA, 39 nt, synthetic construct
  source 1..39: mol_type = other RNA
tgtgttcattgccctgggccggtggctggaacacttggc

SEQ ID NO: 7755 - RNA, 39 nt, synthetic construct
  source 1..39: mol_type = other RNA
tgtgttcattgccctgggccggtggctggaacaccttgc

SEQ ID NO: 7756 - RNA, 40 nt, synthetic construct
  source 1..40: mol_type = other RNA
ttgtgttcattgccctgggccggtggctggaacacctggc

SEQ ID NO: 7757 - RNA, 40 nt, synthetic construct
  source 1..40: mol_type = other RNA
ttgtgttcattgccctgggccggtggctggaacaccttgc

SEQ ID NO: 7758 - RNA, 40 nt, synthetic construct
  source 1..40: mol_type = other RNA
ttgtgttcattgccctgggccggtggctggaacatcttgc

SEQ ID NO: 7759 - RNA, 40 nt, synthetic construct
  source 1..40: mol_type = other RNA
ttgtgttcattgccctgggccggtggctggaacacctcgc

SEQ ID NO: 7760 - RNA, 40 nt, synthetic construct
  source 1..40: mol_type = other RNA
ttgtgttcattgccctgggccggtggctggaacacttggc

SEQ ID NO: 7761 - RNA, 40 nt, synthetic construct
  source 1..40: mol_type = other RNA
ttgtgttcattgccctgggccggtggctggaacatctcgc

SEQ ID NO: 7762 - RNA, 40 nt, synthetic construct
  source 1..40: mol_type = other RNA
ttgtgttcattgccctgggccggtggctggaacatttggc

SEQ ID NO: 7763 - RNA, 40 nt, synthetic construct
  source 1..40: mol_type = other RNA
ttgtgttcattgccctgggccggtggctggaacatctggc

SEQ ID NO: 7764 - RNA, 40 nt, synthetic construct
  source 1..40: mol_type = other RNA
ttgtgttcattgccctgggccggtggctggaacatctagc

SEQ ID NO: 7765 - RNA, 40 nt, synthetic construct
  source 1..40: mol_type = other RNA
ttgtgttcattgccctgggccggtggctggaacacctagc

SEQ ID NO: 7766 - RNA, 41 nt, synthetic construct
  source 1..41: mol_type = other RNA
tttgtgttcattgccctgggccggtggctggaacacctcgc

SEQ ID NO: 7767 - RNA, 41 nt, synthetic construct
  source 1..41: mol_type = other RNA
tttgtgttcattgccctgggccggtggctggaacacctagc

SEQ ID NO: 7768 - RNA, 41 nt, synthetic construct
  source 1..41: mol_type = other RNA
tttgtgttcattgccctgggccggtggctggaacatctcgc

SEQ ID NO: 7769 - RNA, 41 nt, synthetic construct
  source 1..41: mol_type = other RNA
tttgtgttcattgccctgggccggtggctggaacatctagc

SEQ ID NO: 7770 - RNA, 41 nt, synthetic construct
  source 1..41: mol_type = other RNA
tttgtgttcattgccctgggccggtggctggaacatttggc

SEQ ID NO: 7771 - RNA, 41 nt, synthetic construct
  source 1..41: mol_type = other RNA
tttgtgttcattgccctgggccggtggctggaacacttggc

SEQ ID NO: 7772 - RNA, 41 nt, synthetic construct
  source 1..41: mol_type = other RNA
tttgtgttcattgccctgggccggtggctggaacatcttgc

SEQ ID NO: 7773 - RNA, 41 nt, synthetic construct
  source 1..41: mol_type = other RNA
tttgtgttcattgccctgggccggtggctggaacaccttgc

SEQ ID NO: 7774 - RNA, 41 nt, synthetic construct
  source 1..41: mol_type = other RNA
tttgtgttcattgccctgggccggtggctggaacacctggc

SEQ ID NO: 7775 - RNA, 41 nt, synthetic construct
  source 1..41: mol_type = other RNA
tttgtgttcattgccctgggccggtggctggaacatctggc

SEQ ID NO: 7776 - RNA, 42 nt, synthetic construct
  source 1..42: mol_type = other RNA
ctttgtgttcattgccctgggccggtggctggaacaccttgc

SEQ ID NO: 7777 - RNA, 42 nt, synthetic construct
  source 1..42: mol_type = other RNA
ctttgtgttcattgccctgggccggtggctggaacatcttgc

SEQ ID NO: 7778 - RNA, 42 nt, synthetic construct
  source 1..42: mol_type = other RNA
ctttgtgttcattgccctgggccggtggctggaacacttggc

SEQ ID NO: 7779 - RNA, 42 nt, synthetic construct
  source 1..42: mol_type = other RNA
ctttgtgttcattgccctgggccggtggctggaacatctagc

SEQ ID NO: 7780 - RNA, 42 nt, synthetic construct
  source 1..42: mol_type = other RNA
ctttgtgttcattgccctgggccggtggctggaacacctggc

SEQ ID NO: 7781 - RNA, 42 nt, synthetic construct
  source 1..42: mol_type = other RNA
ctttgtgttcattgccctgggccggtggctggaacatctggc

SEQ ID NO: 7782 - RNA, 42 nt, synthetic construct
  source 1..42: mol_type = other RNA
ctttgtgttcattgccctgggccggtggctggaacatttggc

SEQ ID NO: 7783 - RNA, 42 nt, synthetic construct
  source 1..42: mol_type = other RNA
ctttgtgttcattgccctgggccggtggctggaacatctcgc

SEQ ID NO: 7784 - RNA, 42 nt, synthetic construct
  source 1..42: mol_type = other RNA
ctttgtgttcattgccctgggccggtggctggaacacctcgc

SEQ ID NO: 7785 - RNA, 42 nt, synthetic construct
  source 1..42: mol_type = other RNA
ctttgtgttcattgccctgggccggtggctggaacacctagc

SEQ ID NO: 7786 - RNA, 43 nt, synthetic construct
  source 1..43: mol_type = other RNA
tctttgtgttcattgccctgggccggtggctggaacacctagc

SEQ ID NO: 7787 - RNA, 43 nt, synthetic construct
  source 1..43: mol_type = other RNA
tctttgtgttcattgccctgggccggtggctggaacatttggc

SEQ ID NO: 7788 - RNA, 43 nt, synthetic construct
  source 1..43: mol_type = other RNA
tctttgtgttcattgccctgggccggtggctggaacacttggc

SEQ ID NO: 7789 - RNA, 43 nt, synthetic construct
  source 1..43: mol_type = other RNA
tctttgtgttcattgccctgggccggtggctggaacatctggc

SEQ ID NO: 7790 - RNA, 43 nt, synthetic construct
  source 1..43: mol_type = other RNA
tctttgtgttcattgccctgggccggtggctggaacacctcgc

SEQ ID NO: 7791 - RNA, 43 nt, synthetic construct
  source 1..43: mol_type = other RNA
tctttgtgttcattgccctgggccggtggctggaacatcttgc

SEQ ID NO: 7792 - RNA, 43 nt, synthetic construct
  source 1..43: mol_type = other RNA
tctttgtgttcattgccctgggccggtggctggaacatctcgc

SEQ ID NO: 7793 - RNA, 43 nt, synthetic construct
  source 1..43: mol_type = other RNA
tctttgtgttcattgccctgggccggtggctggaacatctagc

SEQ ID NO: 7794 - RNA, 43 nt, synthetic construct
  source 1..43: mol_type = other RNA
tctttgtgttcattgccctgggccggtggctggaacacctggc

SEQ ID NO: 7795 - RNA, 43 nt, synthetic construct
  source 1..43: mol_type = other RNA
tctttgtgttcattgccctgggccggtggctggaacaccttgc

SEQ ID NO: 7796 - RNA, 44 nt, synthetic construct
  source 1..44: mol_type = other RNA
ctctttgtgttcattgccctgggccggtggctggaacacctggc

SEQ ID NO: 7797 - RNA, 44 nt, synthetic construct
  source 1..44: mol_type = other RNA
ctctttgtgttcattgccctgggccggtggctggaacatctagc

SEQ ID NO: 7798 - RNA, 44 nt, synthetic construct
  source 1..44: mol_type = other RNA
ctctttgtgttcattgccctgggccggtggctggaacatcttgc

SEQ ID NO: 7799 - RNA, 44 nt, synthetic construct
  source 1..44: mol_type = other RNA
ctctttgtgttcattgccctgggccggtggctggaacaccttgc

SEQ ID NO: 7800 - RNA, 44 nt, synthetic construct
  source 1..44: mol_type = other RNA
ctctttgtgttcattgccctgggccggtggctggaacatttggc

SEQ ID NO: 7801 - RNA, 44 nt, synthetic construct
  source 1..44: mol_type = other RNA
ctctttgtgttcattgccctgggccggtggctggaacacttggc

SEQ ID NO: 7802 - RNA, 44 nt, synthetic construct
  source 1..44: mol_type = other RNA
ctctttgtgttcattgccctgggccggtggctggaacatctggc

SEQ ID NO: 7803 - RNA, 44 nt, synthetic construct
  source 1..44: mol_type = other RNA
ctctttgtgttcattgccctgggccggtggctggaacacctagc

SEQ ID NO: 7804 - RNA, 44 nt, synthetic construct
  source 1..44: mol_type = other RNA
ctctttgtgttcattgccctgggccggtggctggaacatctcgc

SEQ ID NO: 7805 - RNA, 44 nt, synthetic construct
  source 1..44: mol_type = other RNA
ctctttgtgttcattgccctgggccggtggctggaacacctcgc

SEQ ID NO: 7806 - RNA, 45 nt, synthetic construct
  source 1..45: mol_type = other RNA
gctctttgtgttcattgccctgggccggtggctggaacacttggc

SEQ ID NO: 7807 - RNA, 45 nt, synthetic construct
  source 1..45: mol_type = other RNA
gctctttgtgttcattgccctgggccggtggctggaacatttggc

SEQ ID NO: 7808 - RNA, 45 nt, synthetic construct
  source 1..45: mol_type = other RNA
gctctttgtgttcattgccctgggccggtggctggaacacctagc

SEQ ID NO: 7809 - RNA, 45 nt, synthetic construct
  source 1..45: mol_type = other RNA
gctctttgtgttcattgccctgggccggtggctggaacatctagc

SEQ ID NO: 7810 - RNA, 45 nt, synthetic construct
  source 1..45: mol_type = other RNA
gctctttgtgttcattgccctgggccggtggctggaacatctggc

SEQ ID NO: 7811 - RNA, 45 nt, synthetic construct
  source 1..45: mol_type = other RNA
gctctttgtgttcattgccctgggccggtggctggaacaccttgc

SEQ ID NO: 7812 - RNA, 45 nt, synthetic construct
  source 1..45: mol_type = other RNA
gctctttgtgttcattgccctgggccggtggctggaacacctcgc

SEQ ID NO: 7813 - RNA, 45 nt, synthetic construct
  source 1..45: mol_type = other RNA
gctctttgtgttcattgccctgggccggtggctggaacatcttgc

SEQ ID NO: 7814 - RNA, 45 nt, synthetic construct
  source 1..45: mol_type = other RNA
gctctttgtgttcattgccctgggccggtggctggaacatctcgc

SEQ ID NO: 7815 - RNA, 45 nt, synthetic construct
  source 1..45: mol_type = other RNA
gctctttgtgttcattgccctgggccggtggctggaacacctggc

SEQ ID NO: 7816 - RNA, 46 nt, synthetic construct
  source 1..46: mol_type = other RNA
tgctctttgtgttcattgccctgggccggtggctggaacatttggc

SEQ ID NO: 7817 - RNA, 46 nt, synthetic construct
  source 1..46: mol_type = other RNA
tgctctttgtgttcattgccctgggccggtggctggaacatcttgc

SEQ ID NO: 7818 - RNA, 46 nt, synthetic construct
  source 1..46: mol_type = other RNA
tgctctttgtgttcattgccctgggccggtggctggaacaccttgc

SEQ ID NO: 7819 - RNA, 46 nt, synthetic construct
  source 1..46: mol_type = other RNA
tgctctttgtgttcattgccctgggccggtggctggaacacctagc

SEQ ID NO: 7820 - RNA, 46 nt, synthetic construct
  source 1..46: mol_type = other RNA
tgctctttgtgttcattgccctgggccggtggctggaacatctagc

SEQ ID NO: 7821 - RNA, 46 nt, synthetic construct
  source 1..46: mol_type = other RNA
tgctctttgtgttcattgccctgggccggtggctggaacatctcgc

SEQ ID NO: 7822 - RNA, 46 nt, synthetic construct
  source 1..46: mol_type = other RNA
tgctctttgtgttcattgccctgggccggtggctggaacacttggc

SEQ ID NO: 7823 - RNA, 46 nt, synthetic construct
  source 1..46: mol_type = other RNA
tgctctttgtgttcattgccctgggccggtggctggaacatctggc

SEQ ID NO: 7824 - RNA, 46 nt, synthetic construct
  source 1..46: mol_type = other RNA
tgctctttgtgttcattgccctgggccggtggctggaacacctcgc

SEQ ID NO: 7825 - RNA, 46 nt, synthetic construct
  source 1..46: mol_type = other RNA
tgctctttgtgttcattgccctgggccggtggctggaacacctggc

SEQ ID NO: 7826 - RNA, 47 nt, synthetic construct
  source 1..47: mol_type = other RNA
atgctctttgtgttcattgccctgggccggtggctggaacatttggc

SEQ ID NO: 7827 - RNA, 47 nt, synthetic construct
  source 1..47: mol_type = other RNA
atgctctttgtgttcattgccctgggccggtggctggaacacctagc

SEQ ID NO: 7828 - RNA, 47 nt, synthetic construct
  source 1..47: mol_type = other RNA
atgctctttgtgttcattgccctgggccggtggctggaacacctggc

SEQ ID NO: 7829 - RNA, 47 nt, synthetic construct
  source 1..47: mol_type = other RNA
atgctctttgtgttcattgccctgggccggtggctggaacacttggc

SEQ ID NO: 7830 - RNA, 47 nt, synthetic construct
  source 1..47: mol_type = other RNA
atgctctttgtgttcattgccctgggccggtggctggaacatctcgc

SEQ ID NO: 7831 - RNA, 47 nt, synthetic construct
  source 1..47: mol_type = other RNA
atgctctttgtgttcattgccctgggccggtggctggaacaccttgc

SEQ ID NO: 7832 - RNA, 47 nt, synthetic construct
  source 1..47: mol_type = other RNA
atgctctttgtgttcattgccctgggccggtggctggaacatcttgc

SEQ ID NO: 7833 - RNA, 47 nt, synthetic construct
  source 1..47: mol_type = other RNA
atgctctttgtgttcattgccctgggccggtggctggaacatctagc

SEQ ID NO: 7834 - RNA, 47 nt, synthetic construct
  source 1..47: mol_type = other RNA
atgctctttgtgttcattgccctgggccggtggctggaacacctcgc

SEQ ID NO: 7835 - RNA, 47 nt, synthetic construct
  source 1..47: mol_type = other RNA
atgctctttgtgttcattgccctgggccggtggctggaacatctggc

SEQ ID NO: 7836 - RNA, 48 nt, synthetic construct
  source 1..48: mol_type = other RNA
catgctctttgtgttcattgccctgggccggtggctggaacacctcgc

SEQ ID NO: 7837 - RNA, 48 nt, synthetic construct
  source 1..48: mol_type = other RNA
catgctctttgtgttcattgccctgggccggtggctggaacatttggc

SEQ ID NO: 7838 - RNA, 48 nt, synthetic construct
  source 1..48: mol_type = other RNA
catgctctttgtgttcattgccctgggccggtggctggaacacctggc

SEQ ID NO: 7839 - RNA, 48 nt, synthetic construct
  source 1..48: mol_type = other RNA
catgctctttgtgttcattgccctgggccggtggctggaacaccttgc

SEQ ID NO: 7840 - RNA, 48 nt, synthetic construct
  source 1..48: mol_type = other RNA
catgctctttgtgttcattgccctgggccggtggctggaacacttggc

SEQ ID NO: 7841 - RNA, 48 nt, synthetic construct
  source 1..48: mol_type = other RNA
catgctctttgtgttcattgccctgggccggtggctggaacatctagc

SEQ ID NO: 7842 - RNA, 48 nt, synthetic construct
  source 1..48: mol_type = other RNA
catgctctttgtgttcattgccctgggccggtggctggaacatctggc

SEQ ID NO: 7843 - RNA, 48 nt, synthetic construct
  source 1..48: mol_type = other RNA
catgctctttgtgttcattgccctgggccggtggctggaacacctagc

SEQ ID NO: 7844 - RNA, 48 nt, synthetic construct
  source 1..48: mol_type = other RNA
catgctctttgtgttcattgccctgggccggtggctggaacatcttgc

SEQ ID NO: 7845 - RNA, 48 nt, synthetic construct
  source 1..48: mol_type = other RNA
catgctctttgtgttcattgccctgggccggtggctggaacatctcgc

SEQ ID NO: 7846 - RNA, 49 nt, synthetic construct
  source 1..49: mol_type = other RNA
ccatgctctttgtgttcattgccctgggccggtggctggaacatctcgc

SEQ ID NO: 7847 - RNA, 49 nt, synthetic construct
  source 1..49: mol_type = other RNA
ccatgctctttgtgttcattgccctgggccggtggctggaacatctggc

SEQ ID NO: 7848 - RNA, 49 nt, synthetic construct
  source 1..49: mol_type = other RNA
ccatgctctttgtgttcattgccctgggccggtggctggaacacttggc

SEQ ID NO: 7849 - RNA, 49 nt, synthetic construct
  source 1..49: mol_type = other RNA
ccatgctctttgtgttcattgccctgggccggtggctggaacatcttgc

SEQ ID NO: 7850 - RNA, 49 nt, synthetic construct
  source 1..49: mol_type = other RNA
ccatgctctttgtgttcattgccctgggccggtggctggaacacctggc

SEQ ID NO: 7851 - RNA, 49 nt, synthetic construct
  source 1..49: mol_type = other RNA
ccatgctctttgtgttcattgccctgggccggtggctggaacacctagc

SEQ ID NO: 7852 - RNA, 49 nt, synthetic construct
  source 1..49: mol_type = other RNA
ccatgctctttgtgttcattgccctgggccggtggctggaacacctcgc

SEQ ID NO: 7853 - RNA, 49 nt, synthetic construct
  source 1..49: mol_type = other RNA
ccatgctctttgtgttcattgccctgggccggtggctggaacatctagc

SEQ ID NO: 7854 - RNA, 49 nt, synthetic construct
  source 1..49: mol_type = other RNA
ccatgctctttgtgttcattgccctgggccggtggctggaacaccttgc

SEQ ID NO: 7855 - RNA, 49 nt, synthetic construct
  source 1..49: mol_type = other RNA
ccatgctctttgtgttcattgccctgggccggtggctggaacatttggc

SEQ ID NO: 7856 - RNA, 50 nt, synthetic construct
  source 1..50: mol_type = other RNA
cccatgctctttgtgttcattgccctgggccggtggctggaacatttggc

SEQ ID NO: 7857 - RNA, 50 nt, synthetic construct
  source 1..50: mol_type = other RNA
cccatgctctttgtgttcattgccctgggccggtggctggaacatctcgc

SEQ ID NO: 7858 - RNA, 50 nt, synthetic construct
  source 1..50: mol_type = other RNA
cccatgctctttgtgttcattgccctgggccggtggctggaacatctggc

SEQ ID NO: 7859 - RNA, 50 nt, synthetic construct
  source 1..50: mol_type = other RNA
cccatgctctttgtgttcattgccctgggccggtggctggaacatctagc

SEQ ID NO: 7860 - RNA, 50 nt, synthetic construct
  source 1..50: mol_type = other RNA
cccatgctctttgtgttcattgccctgggccggtggctggaacacctcgc

SEQ ID NO: 7861 - RNA, 50 nt, synthetic construct
  source 1..50: mol_type = other RNA
cccatgctctttgtgttcattgccctgggccggtggctggaacacttggc

SEQ ID NO: 7862 - RNA, 50 nt, synthetic construct
  source 1..50: mol_type = other RNA
cccatgctctttgtgttcattgccctgggccggtggctggaacacctagc

SEQ ID NO: 7863 - RNA, 50 nt, synthetic construct
  source 1..50: mol_type = other RNA
cccatgctctttgtgttcattgccctgggccggtggctggaacacctggc

SEQ ID NO: 7864 - RNA, 50 nt, synthetic construct
  source 1..50: mol_type = other RNA
cccatgctctttgtgttcattgccctgggccggtggctggaacaccttgc

SEQ ID NO: 7865 - RNA, 50 nt, synthetic construct
  source 1..50: mol_type = other RNA
cccatgctctttgtgttcattgccctgggccggtggctggaacatcttgc

SEQ ID NO: 7866 - RNA, 51 nt, synthetic construct
  source 1..51: mol_type = other RNA
ccccatgctctttgtgttcattgccctgggccggtggctggaacatttggc

SEQ ID NO: 7867 - RNA, 51 nt, synthetic construct
  source 1..51: mol_type = other RNA
ccccatgctctttgtgttcattgccctgggccggtggctggaacaccttgc

SEQ ID NO: 7868 - RNA, 51 nt, synthetic construct
  source 1..51: mol_type = other RNA
ccccatgctctttgtgttcattgccctgggccggtggctggaacacctagc

SEQ ID NO: 7869 - RNA, 51 nt, synthetic construct
  source 1..51: mol_type = other RNA
ccccatgctctttgtgttcattgccctgggccggtggctggaacatctagc

SEQ ID NO: 7870 - RNA, 51 nt, synthetic construct
  source 1..51: mol_type = other RNA
ccccatgctctttgtgttcattgccctgggccggtggctggaacatctcgc

SEQ ID NO: 7871 - RNA, 51 nt, synthetic construct
  source 1..51: mol_type = other RNA
ccccatgctctttgtgttcattgccctgggccggtggctggaacacctcgc

SEQ ID NO: 7872 - RNA, 51 nt, synthetic construct
  source 1..51: mol_type = other RNA
ccccatgctctttgtgttcattgccctgggccggtggctggaacacctggc

SEQ ID NO: 7873 - RNA, 51 nt, synthetic construct
  source 1..51: mol_type = other RNA
ccccatgctctttgtgttcattgccctgggccggtggctggaacatctggc

SEQ ID NO: 7874 - RNA, 51 nt, synthetic construct
  source 1..51: mol_type = other RNA
ccccatgctctttgtgttcattgccctgggccggtggctggaacatcttgc

SEQ ID NO: 7875 - RNA, 51 nt, synthetic construct
  source 1..51: mol_type = other RNA
ccccatgctctttgtgttcattgccctgggccggtggctggaacacttggc

SEQ ID NO: 7876 - RNA, 52 nt, synthetic construct
  source 1..52: mol_type = other RNA
cccccatgctctttgtgttcattgccctgggccggtggctggaacatttggc

SEQ ID NO: 7877 - RNA, 52 nt, synthetic construct
  source 1..52: mol_type = other RNA
cccccatgctctttgtgttcattgccctgggccggtggctggaacacttggc

SEQ ID NO: 7878 - RNA, 52 nt, synthetic construct
  source 1..52: mol_type = other RNA
cccccatgctctttgtgttcattgccctgggccggtggctggaacatctggc

SEQ ID NO: 7879 - RNA, 52 nt, synthetic construct
  source 1..52: mol_type = other RNA
cccccatgctctttgtgttcattgccctgggccggtggctggaacaccttgc

SEQ ID NO: 7880 - RNA, 52 nt, synthetic construct
  source 1..52: mol_type = other RNA
cccccatgctctttgtgttcattgccctgggccggtggctggaacatcttgc

SEQ ID NO: 7881 - RNA, 52 nt, synthetic construct
  source 1..52: mol_type = other RNA
cccccatgctctttgtgttcattgccctgggccggtggctggaacacctagc

SEQ ID NO: 7882 - RNA, 52 nt, synthetic construct
  source 1..52: mol_type = other RNA
cccccatgctctttgtgttcattgccctgggccggtggctggaacacctggc

SEQ ID NO: 7883 - RNA, 52 nt, synthetic construct
  source 1..52: mol_type = other RNA
cccccatgctctttgtgttcattgccctgggccggtggctggaacacctcgc

SEQ ID NO: 7884 - RNA, 52 nt, synthetic construct
  source 1..52: mol_type = other RNA
cccccatgctctttgtgttcattgccctgggccggtggctggaacatctcgc

SEQ ID NO: 7885 - RNA, 52 nt, synthetic construct
  source 1..52: mol_type = other RNA
cccccatgctctttgtgttcattgccctgggccggtggctggaacatctagc

SEQ ID NO: 7886 - RNA, 53 nt, synthetic construct
  source 1..53: mol_type = other RNA
ccccccatgctctttgtgttcattgccctgggccggtggctggaacaccttgc

SEQ ID NO: 7887 - RNA, 53 nt, synthetic construct
  source 1..53: mol_type = other RNA
ccccccatgctctttgtgttcattgccctgggccggtggctggaacacctagc

SEQ ID NO: 7888 - RNA, 53 nt, synthetic construct
  source 1..53: mol_type = other RNA
ccccccatgctctttgtgttcattgccctgggccggtggctggaacatctagc

SEQ ID NO: 7889 - RNA, 53 nt, synthetic construct
  source 1..53: mol_type = other RNA
ccccccatgctctttgtgttcattgccctgggccggtggctggaacacttggc

SEQ ID NO: 7890 - RNA, 53 nt, synthetic construct
  source 1..53: mol_type = other RNA
ccccccatgctctttgtgttcattgccctgggccggtggctggaacacctcgc

SEQ ID NO: 7891 - RNA, 53 nt, synthetic construct
  source 1..53: mol_type = other RNA
ccccccatgctctttgtgttcattgccctgggccggtggctggaacacctggc

SEQ ID NO: 7892 - RNA, 53 nt, synthetic construct
  source 1..53: mol_type = other RNA
ccccccatgctctttgtgttcattgccctgggccggtggctggaacatctcgc

SEQ ID NO: 7893 - RNA, 53 nt, synthetic construct
  source 1..53: mol_type = other RNA
ccccccatgctctttgtgttcattgccctgggccggtggctggaacatcttgc

SEQ ID NO: 7894 - RNA, 53 nt, synthetic construct
  source 1..53: mol_type = other RNA
ccccccatgctctttgtgttcattgccctgggccggtggctggaacatttggc

SEQ ID NO: 7895 - RNA, 53 nt, synthetic construct
  source 1..53: mol_type = other RNA
ccccccatgctctttgtgttcattgccctgggccggtggctggaacatctggc

SEQ ID NO: 7896 - RNA, 54 nt, synthetic construct
  source 1..54: mol_type = other RNA
gccccccatgctctttgtgttcattgccctgggccggtggctggaacatctcgc

SEQ ID NO: 7897 - RNA, 54 nt, synthetic construct
  source 1..54: mol_type = other RNA
gccccccatgctctttgtgttcattgccctgggccggtggctggaacatctggc

SEQ ID NO: 7898 - RNA, 54 nt, synthetic construct
  source 1..54: mol_type = other RNA
gccccccatgctctttgtgttcattgccctgggccggtggctggaacacctggc

SEQ ID NO: 7899 - RNA, 54 nt, synthetic construct
  source 1..54: mol_type = other RNA
gccccccatgctctttgtgttcattgccctgggccggtggctggaacaccttgc

SEQ ID NO: 7900 - RNA, 54 nt, synthetic construct
  source 1..54: mol_type = other RNA
gccccccatgctctttgtgttcattgccctgggccggtggctggaacacttggc

SEQ ID NO: 7901 - RNA, 54 nt, synthetic construct
  source 1..54: mol_type = other RNA
gccccccatgctctttgtgttcattgccctgggccggtggctggaacacctcgc

SEQ ID NO: 7902 - RNA, 54 nt, synthetic construct
  source 1..54: mol_type = other RNA
gccccccatgctctttgtgttcattgccctgggccggtggctggaacatttggc

SEQ ID NO: 7903 - RNA, 54 nt, synthetic construct
  source 1..54: mol_type = other RNA
gccccccatgctctttgtgttcattgccctgggccggtggctggaacatcttgc

SEQ ID NO: 7904 - RNA, 54 nt, synthetic construct
  source 1..54: mol_type = other RNA
gccccccatgctctttgtgttcattgccctgggccggtggctggaacatctagc

SEQ ID NO: 7905 - RNA, 54 nt, synthetic construct
  source 1..54: mol_type = other RNA
gccccccatgctctttgtgttcattgccctgggccggtggctggaacacctagc

SEQ ID NO: 7906 - RNA, 55 nt, synthetic construct
  source 1..55: mol_type = other RNA
cgccccccatgctctttgtgttcattgccctgggccggtggctggaacacctcgc

SEQ ID NO: 7907 - RNA, 55 nt, synthetic construct
  source 1..55: mol_type = other RNA
cgccccccatgctctttgtgttcattgccctgggccggtggctggaacacctagc

SEQ ID NO: 7908 - RNA, 55 nt, synthetic construct
  source 1..55: mol_type = other RNA
cgccccccatgctctttgtgttcattgccctgggccggtggctggaacatctcgc

SEQ ID NO: 7909 - RNA, 55 nt, synthetic construct
  source 1..55: mol_type = other RNA
cgccccccatgctctttgtgttcattgccctgggccggtggctggaacacctggc

SEQ ID NO: 7910 - RNA, 55 nt, synthetic construct
  source 1..55: mol_type = other RNA
cgccccccatgctctttgtgttcattgccctgggccggtggctggaacaccttgc

SEQ ID NO: 7911 - RNA, 55 nt, synthetic construct
  source 1..55: mol_type = other RNA
cgccccccatgctctttgtgttcattgccctgggccggtggctggaacatttggc

SEQ ID NO: 7912 - RNA, 55 nt, synthetic construct
  source 1..55: mol_type = other RNA
cgccccccatgctctttgtgttcattgccctgggccggtggctggaacatctagc

SEQ ID NO: 7913 - RNA, 55 nt, synthetic construct
  source 1..55: mol_type = other RNA
cgccccccatgctctttgtgttcattgccctgggccggtggctggaacatcttgc

SEQ ID NO: 7914 - RNA, 55 nt, synthetic construct
  source 1..55: mol_type = other RNA
cgccccccatgctctttgtgttcattgccctgggccggtggctggaacatctggc

SEQ ID NO: 7915 - RNA, 55 nt, synthetic construct
  source 1..55: mol_type = other RNA
cgccccccatgctctttgtgttcattgccctgggccggtggctggaacacttggc

SEQ ID NO: 7916 - RNA, 56 nt, synthetic construct
  source 1..56: mol_type = other RNA
acgccccccatgctctttgtgttcattgccctgggccggtggctggaacaccttgc

SEQ ID NO: 7917 - RNA, 56 nt, synthetic construct
  source 1..56: mol_type = other RNA
acgccccccatgctctttgtgttcattgccctgggccggtggctggaacacctggc

SEQ ID NO: 7918 - RNA, 56 nt, synthetic construct
  source 1..56: mol_type = other RNA
acgccccccatgctctttgtgttcattgccctgggccggtggctggaacatctggc

SEQ ID NO: 7919 - RNA, 56 nt, synthetic construct
  source 1..56: mol_type = other RNA
acgccccccatgctctttgtgttcattgccctgggccggtggctggaacacctcgc

SEQ ID NO: 7920 - RNA, 56 nt, synthetic construct
  source 1..56: mol_type = other RNA
acgccccccatgctctttgtgttcattgccctgggccggtggctggaacatcttgc

SEQ ID NO: 7921 - RNA, 56 nt, synthetic construct
  source 1..56: mol_type = other RNA
acgccccccatgctctttgtgttcattgccctgggccggtggctggaacatttggc

SEQ ID NO: 7922 - RNA, 56 nt, synthetic construct
  source 1..56: mol_type = other RNA
acgccccccatgctctttgtgttcattgccctgggccggtggctggaacacttggc

SEQ ID NO: 7923 - RNA, 56 nt, synthetic construct
  source 1..56: mol_type = other RNA
acgccccccatgctctttgtgttcattgccctgggccggtggctggaacatctcgc

SEQ ID NO: 7924 - RNA, 56 nt, synthetic construct
  source 1..56: mol_type = other RNA
acgccccccatgctctttgtgttcattgccctgggccggtggctggaacacctagc

SEQ ID NO: 7925 - RNA, 56 nt, synthetic construct
  source 1..56: mol_type = other RNA
acgccccccatgctctttgtgttcattgccctgggccggtggctggaacatctagc

SEQ ID NO: 7926 - RNA, 57 nt, synthetic construct
  source 1..57: mol_type = other RNA
cacgccccccatgctctttgtgttcattgccctgggccggtggctggaacatctcgc

SEQ ID NO: 7927 - RNA, 57 nt, synthetic construct
  source 1..57: mol_type = other RNA
cacgccccccatgctctttgtgttcattgccctgggccggtggctggaacatcttgc

SEQ ID NO: 7928 - RNA, 57 nt, synthetic construct
  source 1..57: mol_type = other RNA
cacgccccccatgctctttgtgttcattgccctgggccggtggctggaacaccttgc

SEQ ID NO: 7929 - RNA, 57 nt, synthetic construct
  source 1..57: mol_type = other RNA
cacgccccccatgctctttgtgttcattgccctgggccggtggctggaacatctagc

SEQ ID NO: 7930 - RNA, 57 nt, synthetic construct
  source 1..57: mol_type = other RNA
cacgccccccatgctctttgtgttcattgccctgggccggtggctggaacatttggc

SEQ ID NO: 7931 - RNA, 57 nt, synthetic construct
  source 1..57: mol_type = other RNA
cacgccccccatgctctttgtgttcattgccctgggccggtggctggaacacctcgc

SEQ ID NO: 7932 - RNA, 57 nt, synthetic construct
  source 1..57: mol_type = other RNA
cacgccccccatgctctttgtgttcattgccctgggccggtggctggaacacttggc

SEQ ID NO: 7933 - RNA, 57 nt, synthetic construct
  source 1..57: mol_type = other RNA
cacgccccccatgctctttgtgttcattgccctgggccggtggctggaacatctggc

SEQ ID NO: 7934 - RNA, 57 nt, synthetic construct
  source 1..57: mol_type = other RNA
cacgccccccatgctctttgtgttcattgccctgggccggtggctggaacacctagc

SEQ ID NO: 7935 - RNA, 57 nt, synthetic construct
  source 1..57: mol_type = other RNA
cacgccccccatgctctttgtgttcattgccctgggccggtggctggaacacctggc

SEQ ID NO: 7936 - RNA, 58 nt, synthetic construct
  source 1..58: mol_type = other RNA
acacgccccccatgctctttgtgttcattgccctgggccggtggctggaacatttggc

SEQ ID NO: 7937 - RNA, 58 nt, synthetic construct
  source 1..58: mol_type = other RNA
acacgccccccatgctctttgtgttcattgccctgggccggtggctggaacatctagc

SEQ ID NO: 7938 - RNA, 58 nt, synthetic construct
  source 1..58: mol_type = other RNA
acacgccccccatgctctttgtgttcattgccctgggccggtggctggaacacctagc

SEQ ID NO: 7939 - RNA, 58 nt, synthetic construct
  source 1..58: mol_type = other RNA
acacgccccccatgctctttgtgttcattgccctgggccggtggctggaacatctggc

SEQ ID NO: 7940 - RNA, 58 nt, synthetic construct
  source 1..58: mol_type = other RNA
acacgccccccatgctctttgtgttcattgccctgggccggtggctggaacacctggc

SEQ ID NO: 7941 - RNA, 58 nt, synthetic construct
  source 1..58: mol_type = other RNA
acacgccccccatgctctttgtgttcattgccctgggccggtggctggaacatctcgc

SEQ ID NO: 7942 - RNA, 58 nt, synthetic construct
  source 1..58: mol_type = other RNA
acacgccccccatgctctttgtgttcattgccctgggccggtggctggaacacttggc

SEQ ID NO: 7943 - RNA, 58 nt, synthetic construct
  source 1..58: mol_type = other RNA
acacgccccccatgctctttgtgttcattgccctgggccggtggctggaacatcttgc

SEQ ID NO: 7944 - RNA, 58 nt, synthetic construct
  source 1..58: mol_type = other RNA
acacgccccccatgctctttgtgttcattgccctgggccggtggctggaacacctcgc

SEQ ID NO: 7945 - RNA, 58 nt, synthetic construct
  source 1..58: mol_type = other RNA
acacgccccccatgctctttgtgttcattgccctgggccggtggctggaacaccttgc

SEQ ID NO: 7946 - RNA, 59 nt, synthetic construct
  source 1..59: mol_type = other RNA
gacacgccccccatgctctttgtgttcattgccctgggccggtggctggaacatctggc

SEQ ID NO: 7947 - RNA, 59 nt, synthetic construct
  source 1..59: mol_type = other RNA
gacacgccccccatgctctttgtgttcattgccctgggccggtggctggaacatttggc

SEQ ID NO: 7948 - RNA, 59 nt, synthetic construct
  source 1..59: mol_type = other RNA
gacacgccccccatgctctttgtgttcattgccctgggccggtggctggaacacctagc

SEQ ID NO: 7949 - RNA, 59 nt, synthetic construct
  source 1..59: mol_type = other RNA
gacacgccccccatgctctttgtgttcattgccctgggccggtggctggaacacctggc

SEQ ID NO: 7950 - RNA, 59 nt, synthetic construct
  source 1..59: mol_type = other RNA
gacacgccccccatgctctttgtgttcattgccctgggccggtggctggaacacttggc

SEQ ID NO: 7951 - RNA, 59 nt, synthetic construct
  source 1..59: mol_type = other RNA
gacacgccccccatgctctttgtgttcattgccctgggccggtggctggaacatctagc

SEQ ID NO: 7952 - RNA, 59 nt, synthetic construct
  source 1..59: mol_type = other RNA
gacacgccccccatgctctttgtgttcattgccctgggccggtggctggaacacctcgc

SEQ ID NO: 7953 - RNA, 59 nt, synthetic construct
  source 1..59: mol_type = other RNA
gacacgccccccatgctctttgtgttcattgccctgggccggtggctggaacatcttgc

SEQ ID NO: 7954 - RNA, 59 nt, synthetic construct
  source 1..59: mol_type = other RNA
gacacgccccccatgctctttgtgttcattgccctgggccggtggctggaacaccttgc

SEQ ID NO: 7955 - RNA, 59 nt, synthetic construct
  source 1..59: mol_type = other RNA
gacacgccccccatgctctttgtgttcattgccctgggccggtggctggaacatctcgc

SEQ ID NO: 7956 - RNA, 60 nt, synthetic construct
  source 1..60: mol_type = other RNA
cgacacgccccccatgctctttgtgttcattgccctgggccggtggctggaacatctggc

SEQ ID NO: 7957 - RNA, 60 nt, synthetic construct
  source 1..60: mol_type = other RNA
cgacacgccccccatgctctttgtgttcattgccctgggccggtggctggaacatcttgc

SEQ ID NO: 7958 - RNA, 60 nt, synthetic construct
  source 1..60: mol_type = other RNA
cgacacgccccccatgctctttgtgttcattgccctgggccggtggctggaacacctagc

SEQ ID NO: 7959 - RNA, 60 nt, synthetic construct
  source 1..60: mol_type = other RNA
cgacacgccccccatgctctttgtgttcattgccctgggccggtggctggaacacctcgc

SEQ ID NO: 7960 - RNA, 60 nt, synthetic construct
  source 1..60: mol_type = other RNA
cgacacgccccccatgctctttgtgttcattgccctgggccggtggctggaacatttggc

SEQ ID NO: 7961 - RNA, 60 nt, synthetic construct
  source 1..60: mol_type = other RNA
cgacacgccccccatgctctttgtgttcattgccctgggccggtggctggaacatctcgc

SEQ ID NO: 7962 - RNA, 60 nt, synthetic construct
  source 1..60: mol_type = other RNA
cgacacgccccccatgctctttgtgttcattgccctgggccggtggctggaacacttggc

SEQ ID NO: 7963 - RNA, 60 nt, synthetic construct
  source 1..60: mol_type = other RNA
cgacacgccccccatgctctttgtgttcattgccctgggccggtggctggaacacctggc

SEQ ID NO: 7964 - RNA, 60 nt, synthetic construct
  source 1..60: mol_type = other RNA
cgacacgccccccatgctctttgtgttcattgccctgggccggtggctggaacatctagc

SEQ ID NO: 7965 - RNA, 60 nt, synthetic construct
  source 1..60: mol_type = other RNA
cgacacgccccccatgctctttgtgttcattgccctgggccggtggctggaacaccttgc

SEQ ID NO: 7966 - RNA, 61 nt, synthetic construct
  source 1..61: mol_type = other RNA
tcgacacgccccccatgctctttgtgttcattgccctgggccggtggctggaacatctggc

SEQ ID NO: 7967 - RNA, 61 nt, synthetic construct
  source 1..61: mol_type = other RNA
tcgacacgccccccatgctctttgtgttcattgccctgggccggtggctggaacacctcgc

SEQ ID NO: 7968 - RNA, 61 nt, synthetic construct
  source 1..61: mol_type = other RNA
tcgacacgccccccatgctctttgtgttcattgccctgggccggtggctggaacacttggc

SEQ ID NO: 7969 - RNA, 61 nt, synthetic construct
  source 1..61: mol_type = other RNA
tcgacacgccccccatgctctttgtgttcattgccctgggccggtggctggaacatctagc

SEQ ID NO: 7970 - RNA, 61 nt, synthetic construct
  source 1..61: mol_type = other RNA
tcgacacgccccccatgctctttgtgttcattgccctgggccggtggctggaacatcttgc

SEQ ID NO: 7971 - RNA, 61 nt, synthetic construct
  source 1..61: mol_type = other RNA
tcgacacgccccccatgctctttgtgttcattgccctgggccggtggctggaacatctcgc

SEQ ID NO: 7972 - RNA, 61 nt, synthetic construct
  source 1..61: mol_type = other RNA
tcgacacgccccccatgctctttgtgttcattgccctgggccggtggctggaacatttggc

SEQ ID NO: 7973 - RNA, 61 nt, synthetic construct
  source 1..61: mol_type = other RNA
tcgacacgccccccatgctctttgtgttcattgccctgggccggtggctggaacaccttgc

SEQ ID NO: 7974 - RNA, 61 nt, synthetic construct
  source 1..61: mol_type = other RNA
tcgacacgccccccatgctctttgtgttcattgccctgggccggtggctggaacacctggc

SEQ ID NO: 7975 - RNA, 61 nt, synthetic construct
  source 1..61: mol_type = other RNA
tcgacacgccccccatgctctttgtgttcattgccctgggccggtggctggaacacctagc

SEQ ID NO: 7976 - RNA, 62 nt, synthetic construct
  source 1..62: mol_type = other RNA
ttcgacacgccccccatgctctttgtgttcattgccctgggccggtggctggaacatctggc

SEQ ID NO: 7977 - RNA, 62 nt, synthetic construct
  source 1..62: mol_type = other RNA
ttcgacacgccccccatgctctttgtgttcattgccctgggccggtggctggaacatttggc

SEQ ID NO: 7978 - RNA, 62 nt, synthetic construct
  source 1..62: mol_type = other RNA
ttcgacacgccccccatgctctttgtgttcattgccctgggccggtggctggaacacctggc

SEQ ID NO: 7979 - RNA, 62 nt, synthetic construct
  source 1..62: mol_type = other RNA
ttcgacacgccccccatgctctttgtgttcattgccctgggccggtggctggaacacttggc

SEQ ID NO: 7980 - RNA, 62 nt, synthetic construct
  source 1..62: mol_type = other RNA
ttcgacacgccccccatgctctttgtgttcattgccctgggccggtggctggaacaccttgc

SEQ ID NO: 7981 - RNA, 62 nt, synthetic construct
  source 1..62: mol_type = other RNA
ttcgacacgccccccatgctctttgtgttcattgccctgggccggtggctggaacacctcgc

SEQ ID NO: 7982 - RNA, 62 nt, synthetic construct
  source 1..62: mol_type = other RNA
ttcgacacgccccccatgctctttgtgttcattgccctgggccggtggctggaacatctagc

SEQ ID NO: 7983 - RNA, 62 nt, synthetic construct
  source 1..62: mol_type = other RNA
ttcgacacgccccccatgctctttgtgttcattgccctgggccggtggctggaacatcttgc

SEQ ID NO: 7984 - RNA, 62 nt, synthetic construct
  source 1..62: mol_type = other RNA
ttcgacacgccccccatgctctttgtgttcattgccctgggccggtggctggaacatctcgc

SEQ ID NO: 7985 - RNA, 62 nt, synthetic construct
  source 1..62: mol_type = other RNA
ttcgacacgccccccatgctctttgtgttcattgccctgggccggtggctggaacacctagc

SEQ ID NO: 7986 - RNA, 63 nt, synthetic construct
  source 1..63: mol_type = other RNA
cttcgacacgccccccatgctctttgtgttcattgccctgggccggtggctggaacatctcgc

SEQ ID NO: 7987 - RNA, 63 nt, synthetic construct
  source 1..63: mol_type = other RNA
cttcgacacgccccccatgctctttgtgttcattgccctgggccggtggctggaacacttggc

SEQ ID NO: 7988 - RNA, 63 nt, synthetic construct
  source 1..63: mol_type = other RNA
cttcgacacgccccccatgctctttgtgttcattgccctgggccggtggctggaacatttggc

SEQ ID NO: 7989 - RNA, 63 nt, synthetic construct
  source 1..63: mol_type = other RNA
cttcgacacgccccccatgctctttgtgttcattgccctgggccggtggctggaacacctagc

SEQ ID NO: 7990 - RNA, 63 nt, synthetic construct
  source 1..63: mol_type = other RNA
cttcgacacgccccccatgctctttgtgttcattgccctgggccggtggctggaacatctggc

SEQ ID NO: 7991 - RNA, 63 nt, synthetic construct
  source 1..63: mol_type = other RNA
cttcgacacgccccccatgctctttgtgttcattgccctgggccggtggctggaacaccttgc

SEQ ID NO: 7992 - RNA, 63 nt, synthetic construct
  source 1..63: mol_type = other RNA
cttcgacacgccccccatgctctttgtgttcattgccctgggccggtggctggaacatctagc

SEQ ID NO: 7993 - RNA, 63 nt, synthetic construct
  source 1..63: mol_type = other RNA
cttcgacacgccccccatgctctttgtgttcattgccctgggccggtggctggaacacctggc

SEQ ID NO: 7994 - RNA, 63 nt, synthetic construct
  source 1..63: mol_type = other RNA
cttcgacacgccccccatgctctttgtgttcattgccctgggccggtggctggaacatcttgc

SEQ ID NO: 7995 - RNA, 63 nt, synthetic construct
  source 1..63: mol_type = other RNA
cttcgacacgccccccatgctctttgtgttcattgccctgggccggtggctggaacacctcgc

SEQ ID NO: 7996 - RNA, 64 nt, synthetic construct
  source 1..64: mol_type = other RNA
tcttcgacacgccccccatgctctttgtgttcattgccctgggccggtggctggaacatctggc

SEQ ID NO: 7997 - RNA, 64 nt, synthetic construct
  source 1..64: mol_type = other RNA
tcttcgacacgccccccatgctctttgtgttcattgccctgggccggtggctggaacacttggc

SEQ ID NO: 7998 - RNA, 64 nt, synthetic construct
  source 1..64: mol_type = other RNA
tcttcgacacgccccccatgctctttgtgttcattgccctgggccggtggctggaacaccttgc

SEQ ID NO: 7999 - RNA, 64 nt, synthetic construct
  source 1..64: mol_type = other RNA
tcttcgacacgccccccatgctctttgtgttcattgccctgggccggtggctggaacatttggc

SEQ ID NO: 8000 - RNA, 64 nt, synthetic construct
  source 1..64: mol_type = other RNA
tcttcgacacgccccccatgctctttgtgttcattgccctgggccggtggctggaacatcttgc

SEQ ID NO: 8001 - RNA, 64 nt, synthetic construct
  source 1..64: mol_type = other RNA
tcttcgacacgccccccatgctctttgtgttcattgccctgggccggtggctggaacatctagc

SEQ ID NO: 8002 - RNA, 64 nt, synthetic construct
  source 1..64: mol_type = other RNA
tcttcgacacgccccccatgctctttgtgttcattgccctgggccggtggctggaacacctagc

SEQ ID NO: 8003 - RNA, 64 nt, synthetic construct
  source 1..64: mol_type = other RNA
tcttcgacacgccccccatgctctttgtgttcattgccctgggccggtggctggaacacctggc

SEQ ID NO: 8004 - RNA, 64 nt, synthetic construct
  source 1..64: mol_type = other RNA
tcttcgacacgccccccatgctctttgtgttcattgccctgggccggtggctggaacacctcgc

SEQ ID NO: 8005 - RNA, 64 nt, synthetic construct
  source 1..64: mol_type = other RNA
tcttcgacacgccccccatgctctttgtgttcattgccctgggccggtggctggaacatctcgc

SEQ ID NO: 8006 - RNA, 65 nt, synthetic construct
  source 1..65: mol_type = other RNA
ttcttcgacacgccccccatgctctttgtgttcattgccctgggccggtggctggaacatctagc

SEQ ID NO: 8007 - RNA, 65 nt, synthetic construct
  source 1..65: mol_type = other RNA
ttcttcgacacgccccccatgctctttgtgttcattgccctgggccggtggctggaacacctggc

SEQ ID NO: 8008 - RNA, 65 nt, synthetic construct
  source 1..65: mol_type = other RNA
ttcttcgacacgccccccatgctctttgtgttcattgccctgggccggtggctggaacatctggc

SEQ ID NO: 8009 - RNA, 65 nt, synthetic construct
  source 1..65: mol_type = other RNA
ttcttcgacacgccccccatgctctttgtgttcattgccctgggccggtggctggaacatttggc

SEQ ID NO: 8010 - RNA, 65 nt, synthetic construct
  source 1..65: mol_type = other RNA
ttcttcgacacgccccccatgctctttgtgttcattgccctgggccggtggctggaacatctcgc

SEQ ID NO: 8011 - RNA, 65 nt, synthetic construct
  source 1..65: mol_type = other RNA
ttcttcgacacgccccccatgctctttgtgttcattgccctgggccggtggctggaacacctcgc

SEQ ID NO: 8012 - RNA, 65 nt, synthetic construct
  source 1..65: mol_type = other RNA
ttcttcgacacgccccccatgctctttgtgttcattgccctgggccggtggctggaacatcttgc

SEQ ID NO: 8013 - RNA, 65 nt, synthetic construct
  source 1..65: mol_type = other RNA
ttcttcgacacgccccccatgctctttgtgttcattgccctgggccggtggctggaacaccttgc

SEQ ID NO: 8014 - RNA, 65 nt, synthetic construct
  source 1..65: mol_type = other RNA
ttcttcgacacgccccccatgctctttgtgttcattgccctgggccggtggctggaacacttggc

SEQ ID NO: 8015 - RNA, 65 nt, synthetic construct
  source 1..65: mol_type = other RNA
ttcttcgacacgccccccatgctctttgtgttcattgccctgggccggtggctggaacacctagc

SEQ ID NO: 8016 - RNA, 66 nt, synthetic construct
  source 1..66: mol_type = other RNA
attcttcgacacgccccccatgctctttgtgttcattgccctgggccggtggctggaacacctagc

SEQ ID NO: 8017 - RNA, 66 nt, synthetic construct
  source 1..66: mol_type = other RNA
attcttcgacacgccccccatgctctttgtgttcattgccctgggccggtggctggaacacctggc

SEQ ID NO: 8018 - RNA, 66 nt, synthetic construct
  source 1..66: mol_type = other RNA
attcttcgacacgccccccatgctctttgtgttcattgccctgggccggtggctggaacacctcgc

SEQ ID NO: 8019 - RNA, 66 nt, synthetic construct
  source 1..66: mol_type = other RNA
attcttcgacacgccccccatgctctttgtgttcattgccctgggccggtggctggaacaccttgc

SEQ ID NO: 8020 - RNA, 66 nt, synthetic construct
  source 1..66: mol_type = other RNA
attcttcgacacgccccccatgctctttgtgttcattgccctgggccggtggctggaacatctcgc

SEQ ID NO: 8021 - RNA, 66 nt, synthetic construct
  source 1..66: mol_type = other RNA
attcttcgacacgccccccatgctctttgtgttcattgccctgggccggtggctggaacatcttgc

SEQ ID NO: 8022 - RNA, 66 nt, synthetic construct
  source 1..66: mol_type = other RNA
attcttcgacacgccccccatgctctttgtgttcattgccctgggccggtggctggaacacttggc

SEQ ID NO: 8023 - RNA, 66 nt, synthetic construct
  source 1..66: mol_type = other RNA
attcttcgacacgccccccatgctctttgtgttcattgccctgggccggtggctggaacatctagc

SEQ ID NO: 8024 - RNA, 66 nt, synthetic construct
  source 1..66: mol_type = other RNA
attcttcgacacgccccccatgctctttgtgttcattgccctgggccggtggctggaacatctggc

SEQ ID NO: 8025 - RNA, 66 nt, synthetic construct
  source 1..66: mol_type = other RNA
attcttcgacacgccccccatgctctttgtgttcattgccctgggccggtggctggaacatttggc

SEQ ID NO: 8026 - RNA, 67 nt, synthetic construct
  source 1..67: mol_type = other RNA
cattcttcgacacgccccccatgctctttgtgttcattgccctgggccggtggctggaacacctggc

SEQ ID NO: 8027 - RNA, 67 nt, synthetic construct
  source 1..67: mol_type = other RNA
cattcttcgacacgccccccatgctctttgtgttcattgccctgggccggtggctggaacaccttgc

SEQ ID NO: 8028 - RNA, 67 nt, synthetic construct
  source 1..67: mol_type = other RNA
cattcttcgacacgccccccatgctctttgtgttcattgccctgggccggtggctggaacacctcgc

SEQ ID NO: 8029 - RNA, 67 nt, synthetic construct
  source 1..67: mol_type = other RNA
cattcttcgacacgccccccatgctctttgtgttcattgccctgggccggtggctggaacatctagc

SEQ ID NO: 8030 - RNA, 67 nt, synthetic construct
  source 1..67: mol_type = other RNA
cattcttcgacacgccccccatgctctttgtgttcattgccctgggccggtggctggaacatttggc

SEQ ID NO: 8031 - RNA, 67 nt, synthetic construct
  source 1..67: mol_type = other RNA
cattcttcgacacgccccccatgctctttgtgttcattgccctgggccggtggctggaacacttggc

SEQ ID NO: 8032 - RNA, 67 nt, synthetic construct
  source 1..67: mol_type = other RNA
cattcttcgacacgccccccatgctctttgtgttcattgccctgggccggtggctggaacacctagc

SEQ ID NO: 8033 - RNA, 67 nt, synthetic construct
  source 1..67: mol_type = other RNA
cattcttcgacacgccccccatgctctttgtgttcattgccctgggccggtggctggaacatcttgc

SEQ ID NO: 8034 - RNA, 67 nt, synthetic construct
  source 1..67: mol_type = other RNA
cattcttcgacacgccccccatgctctttgtgttcattgccctgggccggtggctggaacatctcgc

SEQ ID NO: 8035 - RNA, 67 nt, synthetic construct
  source 1..67: mol_type = other RNA
cattcttcgacacgccccccatgctctttgtgttcattgccctgggccggtggctggaacatctggc

SEQ ID NO: 8036 - RNA, 68 nt, synthetic construct
  source 1..68: mol_type = other RNA
acattcttcgacacgccccccatgctctttgtgttcattgccctgggccggtggctggaacacttggc

SEQ ID NO: 8037 - RNA, 68 nt, synthetic construct
  source 1..68: mol_type = other RNA
acattcttcgacacgccccccatgctctttgtgttcattgccctgggccggtggctggaacatcttgc

SEQ ID NO: 8038 - RNA, 68 nt, synthetic construct
  source 1..68: mol_type = other RNA
acattcttcgacacgccccccatgctctttgtgttcattgccctgggccggtggctggaacatctggc

SEQ ID NO: 8039 - RNA, 68 nt, synthetic construct
  source 1..68: mol_type = other RNA
acattcttcgacacgccccccatgctctttgtgttcattgccctgggccggtggctggaacacctagc

SEQ ID NO: 8040 - RNA, 68 nt, synthetic construct
  source 1..68: mol_type = other RNA
acattcttcgacacgccccccatgctctttgtgttcattgccctgggccggtggctggaacatctcgc

SEQ ID NO: 8041 - RNA, 68 nt, synthetic construct
  source 1..68: mol_type = other RNA
acattcttcgacacgccccccatgctctttgtgttcattgccctgggccggtggctggaacatttggc

SEQ ID NO: 8042 - RNA, 68 nt, synthetic construct
  source 1..68: mol_type = other RNA
acattcttcgacacgccccccatgctctttgtgttcattgccctgggccggtggctggaacacctcgc

SEQ ID NO: 8043 - RNA, 68 nt, synthetic construct
  source 1..68: mol_type = other RNA
acattcttcgacacgccccccatgctctttgtgttcattgccctgggccggtggctggaacacctggc

SEQ ID NO: 8044 - RNA, 68 nt, synthetic construct
  source 1..68: mol_type = other RNA
acattcttcgacacgccccccatgctctttgtgttcattgccctgggccggtggctggaacatctagc

SEQ ID NO: 8045 - RNA, 68 nt, synthetic construct
  source 1..68: mol_type = other RNA
acattcttcgacacgccccccatgctctttgtgttcattgccctgggccggtggctggaacaccttgc

SEQ ID NO: 8046 - RNA, 69 nt, synthetic construct
  source 1..69: mol_type = other RNA
gacattcttcgacacgccccccatgctctttgtgttcattgccctgggccggtggctggaacatctggc

SEQ ID NO: 8047 - RNA, 69 nt, synthetic construct
  source 1..69: mol_type = other RNA
gacattcttcgacacgccccccatgctctttgtgttcattgccctgggccggtggctggaacacctcgc

SEQ ID NO: 8048 - RNA, 69 nt, synthetic construct
  source 1..69: mol_type = other RNA
gacattcttcgacacgccccccatgctctttgtgttcattgccctgggccggtggctggaacatctcgc

SEQ ID NO: 8049 - RNA, 69 nt, synthetic construct
  source 1..69: mol_type = other RNA
gacattcttcgacacgccccccatgctctttgtgttcattgccctgggccggtggctggaacaccttgc

SEQ ID NO: 8050 - RNA, 69 nt, synthetic construct
  source 1..69: mol_type = other RNA
gacattcttcgacacgccccccatgctctttgtgttcattgccctgggccggtggctggaacacttggc

SEQ ID NO: 8051 - RNA, 69 nt, synthetic construct
  source 1..69: mol_type = other RNA
gacattcttcgacacgccccccatgctctttgtgttcattgccctgggccggtggctggaacatcttgc

SEQ ID NO: 8052 - RNA, 69 nt, synthetic construct
  source 1..69: mol_type = other RNA
gacattcttcgacacgccccccatgctctttgtgttcattgccctgggccggtggctggaacacctagc

SEQ ID NO: 8053 - RNA, 69 nt, synthetic construct
  source 1..69: mol_type = other RNA
gacattcttcgacacgccccccatgctctttgtgttcattgccctgggccggtggctggaacatctagc

SEQ ID NO: 8054 - RNA, 69 nt, synthetic construct
  source 1..69: mol_type = other RNA
gacattcttcgacacgccccccatgctctttgtgttcattgccctgggccggtggctggaacatttggc

SEQ ID NO: 8055 - RNA, 69 nt, synthetic construct
  source 1..69: mol_type = other RNA
gacattcttcgacacgccccccatgctctttgtgttcattgccctgggccggtggctggaacacctggc

SEQ ID NO: 8056 - RNA, 70 nt, synthetic construct
  source 1..70: mol_type = other RNA
tgacattcttcgacacgccccccatgctctttgtgttcattgccctgggccggtggctggaacatctagc

SEQ ID NO: 8057 - RNA, 70 nt, synthetic construct
  source 1..70: mol_type = other RNA
tgacattcttcgacacgccccccatgctctttgtgttcattgccctgggccggtggctggaacatctcgc

SEQ ID NO: 8058 - RNA, 70 nt, synthetic construct
  source 1..70: mol_type = other RNA
tgacattcttcgacacgccccccatgctctttgtgttcattgccctgggccggtggctggaacacctggc

SEQ ID NO: 8059 - RNA, 70 nt, synthetic construct
  source 1..70: mol_type = other RNA
tgacattcttcgacacgccccccatgctctttgtgttcattgccctgggccggtggctggaacatctggc

SEQ ID NO: 8060 - RNA, 70 nt, synthetic construct
  source 1..70: mol_type = other RNA
tgacattcttcgacacgccccccatgctctttgtgttcattgccctgggccggtggctggaacatcttgc

SEQ ID NO: 8061 - RNA, 70 nt, synthetic construct
  source 1..70: mol_type = other RNA
tgacattcttcgacacgccccccatgctctttgtgttcattgccctgggccggtggctggaacaccttgc

SEQ ID NO: 8062 - RNA, 70 nt, synthetic construct
  source 1..70: mol_type = other RNA
tgacattcttcgacacgccccccatgctctttgtgttcattgccctgggccggtggctggaacacttggc

SEQ ID NO: 8063 - RNA, 70 nt, synthetic construct
  source 1..70: mol_type = other RNA
tgacattcttcgacacgccccccatgctctttgtgttcattgccctgggccggtggctggaacacctagc

SEQ ID NO: 8064 - RNA, 70 nt, synthetic construct
  source 1..70: mol_type = other RNA
tgacattcttcgacacgccccccatgctctttgtgttcattgccctgggccggtggctggaacatttggc

SEQ ID NO: 8065 - RNA, 70 nt, synthetic construct
  source 1..70: mol_type = other RNA
tgacattcttcgacacgccccccatgctctttgtgttcattgccctgggccggtggctggaacacctcgc

SEQ ID NO: 8066 - RNA, 71 nt, synthetic construct
  source 1..71: mol_type = other RNA
gtgacattcttcgacacgccccccatgctctttgtgttcattgccctgggccggtggctggaacacctagc

SEQ ID NO: 8067 - RNA, 71 nt, synthetic construct
  source 1..71: mol_type = other RNA
gtgacattcttcgacacgccccccatgctctttgtgttcattgccctgggccggtggctggaacatctggc

SEQ ID NO: 8068 - RNA, 71 nt, synthetic construct
  source 1..71: mol_type = other RNA
gtgacattcttcgacacgccccccatgctctttgtgttcattgccctgggccggtggctggaacatctcgc

SEQ ID NO: 8069 - RNA, 71 nt, synthetic construct
  source 1..71: mol_type = other RNA
gtgacattcttcgacacgccccccatgctctttgtgttcattgccctgggccggtggctggaacatttggc

SEQ ID NO: 8070 - RNA, 71 nt, synthetic construct
  source 1..71: mol_type = other RNA
gtgacattcttcgacacgccccccatgctctttgtgttcattgccctgggccggtggctggaacatcttgc

SEQ ID NO: 8071 - RNA, 71 nt, synthetic construct
  source 1..71: mol_type = other RNA
gtgacattcttcgacacgccccccatgctctttgtgttcattgccctgggccggtggctggaacacttggc

SEQ ID NO: 8072 - RNA, 71 nt, synthetic construct
  source 1..71: mol_type = other RNA
gtgacattcttcgacacgccccccatgctctttgtgttcattgccctgggccggtggctggaacacctcgc

SEQ ID NO: 8073 - RNA, 71 nt, synthetic construct
  source 1..71: mol_type = other RNA
gtgacattcttcgacacgccccccatgctctttgtgttcattgccctgggccggtggctggaacaccttgc

SEQ ID NO: 8074 - RNA, 71 nt, synthetic construct
  source 1..71: mol_type = other RNA
gtgacattcttcgacacgccccccatgctctttgtgttcattgccctgggccggtggctggaacatctagc

SEQ ID NO: 8075 - RNA, 71 nt, synthetic construct
  source 1..71: mol_type = other RNA
gtgacattcttcgacacgccccccatgctctttgtgttcattgccctgggccggtggctggaacacctggc

SEQ ID NO: 8076 - RNA, 72 nt, synthetic construct
  source 1..72: mol_type = other RNA
tgtgacattcttcgacacgccccccatgctctttgtgttcattgccctgggccggtggctggaacatctagc

SEQ ID NO: 8077 - RNA, 72 nt, synthetic construct
  source 1..72: mol_type = other RNA
tgtgacattcttcgacacgccccccatgctctttgtgttcattgccctgggccggtggctggaacacctcgc

SEQ ID NO: 8078 - RNA, 72 nt, synthetic construct
  source 1..72: mol_type = other RNA
tgtgacattcttcgacacgccccccatgctctttgtgttcattgccctgggccggtggctggaacacttggc

SEQ ID NO: 8079 - RNA, 72 nt, synthetic construct
  source 1..72: mol_type = other RNA
tgtgacattcttcgacacgccccccatgctctttgtgttcattgccctgggccggtggctggaacatctcgc

SEQ ID NO: 8080 - RNA, 72 nt, synthetic construct
  source 1..72: mol_type = other RNA
tgtgacattcttcgacacgccccccatgctctttgtgttcattgccctgggccggtggctggaacatttggc

SEQ ID NO: 8081 - RNA, 72 nt, synthetic construct
  source 1..72: mol_type = other RNA
tgtgacattcttcgacacgccccccatgctctttgtgttcattgccctgggccggtggctggaacatcttgc

SEQ ID NO: 8082 - RNA, 72 nt, synthetic construct
  source 1..72: mol_type = other RNA
tgtgacattcttcgacacgccccccatgctctttgtgttcattgccctgggccggtggctggaacaccttgc

SEQ ID NO: 8083 - RNA, 72 nt, synthetic construct
  source 1..72: mol_type = other RNA
tgtgacattcttcgacacgccccccatgctctttgtgttcattgccctgggccggtggctggaacacctagc

SEQ ID NO: 8084 - RNA, 72 nt, synthetic construct
  source 1..72: mol_type = other RNA
tgtgacattcttcgacacgccccccatgctctttgtgttcattgccctgggccggtggctggaacatctggc

SEQ ID NO: 8085 - RNA, 72 nt, synthetic construct
  source 1..72: mol_type = other RNA
tgtgacattcttcgacacgccccccatgctctttgtgttcattgccctgggccggtggctggaacacctggc

SEQ ID NO: 8086 - RNA, 73 nt, synthetic construct
  source 1..73: mol_type = other RNA
ctgtgacattcttcgacacgccccccatgctctttgtgttcattgccctgggccggtggctggaacacttggc

SEQ ID NO: 8087 - RNA, 73 nt, synthetic construct
  source 1..73: mol_type = other RNA
ctgtgacattcttcgacacgccccccatgctctttgtgttcattgccctgggccggtggctggaacatctcgc

SEQ ID NO: 8088 - RNA, 73 nt, synthetic construct
  source 1..73: mol_type = other RNA
ctgtgacattcttcgacacgccccccatgctctttgtgttcattgccctgggccggtggctggaacatctggc

SEQ ID NO: 8089 - RNA, 73 nt, synthetic construct
  source 1..73: mol_type = other RNA
ctgtgacattcttcgacacgccccccatgctctttgtgttcattgccctgggccggtggctggaacacctcgc

SEQ ID NO: 8090 - RNA, 73 nt, synthetic construct
  source 1..73: mol_type = other RNA
ctgtgacattcttcgacacgccccccatgctctttgtgttcattgccctgggccggtggctggaacacctagc

SEQ ID NO: 8091 - RNA, 73 nt, synthetic construct
  source 1..73: mol_type = other RNA
ctgtgacattcttcgacacgccccccatgctctttgtgttcattgccctgggccggtggctggaacatcttgc

SEQ ID NO: 8092 - RNA, 73 nt, synthetic construct
  source 1..73: mol_type = other RNA
ctgtgacattcttcgacacgccccccatgctctttgtgttcattgccctgggccggtggctggaacatctagc

SEQ ID NO: 8093 - RNA, 73 nt, synthetic construct
  source 1..73: mol_type = other RNA
ctgtgacattcttcgacacgccccccatgctctttgtgttcattgccctgggccggtggctggaacaccttgc

SEQ ID NO: 8094 - RNA, 73 nt, synthetic construct
  source 1..73: mol_type = other RNA
ctgtgacattcttcgacacgccccccatgctctttgtgttcattgccctgggccggtggctggaacacctggc

SEQ ID NO: 8095 - RNA, 73 nt, synthetic construct
  source 1..73: mol_type = other RNA
ctgtgacattcttcgacacgccccccatgctctttgtgttcattgccctgggccggtggctggaacatttggc

SEQ ID NO: 8096 - RNA, 74 nt, synthetic construct
  source 1..74: mol_type = other RNA
cctgtgacattcttcgacacgccccccatgctctttgtgttcattgccctgggccggtggctggaacatcttgc

SEQ ID NO: 8097 - RNA, 74 nt, synthetic construct
  source 1..74: mol_type = other RNA
cctgtgacattcttcgacacgccccccatgctctttgtgttcattgccctgggccggtggctggaacacctcgc

SEQ ID NO: 8098 - RNA, 74 nt, synthetic construct
  source 1..74: mol_type = other RNA
cctgtgacattcttcgacacgccccccatgctctttgtgttcattgccctgggccggtggctggaacacctagc

SEQ ID NO: 8099 - RNA, 74 nt, synthetic construct
  source 1..74: mol_type = other RNA
cctgtgacattcttcgacacgccccccatgctctttgtgttcattgccctgggccggtggctggaacatctggc

SEQ ID NO: 8100 - RNA, 74 nt, synthetic construct
  source 1..74: mol_type = other RNA
cctgtgacattcttcgacacgccccccatgctctttgtgttcattgccctgggccggtggctggaacaccttgc

SEQ ID NO: 8101 - RNA, 74 nt, synthetic construct
  source 1..74: mol_type = other RNA
cctgtgacattcttcgacacgccccccatgctctttgtgttcattgccctgggccggtggctggaacacctggc

SEQ ID NO: 8102 - RNA, 74 nt, synthetic construct
  source 1..74: mol_type = other RNA
cctgtgacattcttcgacacgccccccatgctctttgtgttcattgccctgggccggtggctggaacatctagc

SEQ ID NO: 8103 - RNA, 74 nt, synthetic construct
  source 1..74: mol_type = other RNA
cctgtgacattcttcgacacgccccccatgctctttgtgttcattgccctgggccggtggctggaacacttggc

SEQ ID NO: 8104 - RNA, 74 nt, synthetic construct
  source 1..74: mol_type = other RNA
cctgtgacattcttcgacacgccccccatgctctttgtgttcattgccctgggccggtggctggaacatctcgc

SEQ ID NO: 8105 - RNA, 74 nt, synthetic construct
  source 1..74: mol_type = other RNA
cctgtgacattcttcgacacgccccccatgctctttgtgttcattgccctgggccggtggctggaacatttggc

SEQ ID NO: 8106 - RNA, 75 nt, synthetic construct
  source 1..75: mol_type = other RNA
ccctgtgacattcttcgacacgccccccatgctctttgtgttcattgccctgggccggtggctggaacacttggc

SEQ ID NO: 8107 - RNA, 75 nt, synthetic construct
  source 1..75: mol_type = other RNA
ccctgtgacattcttcgacacgccccccatgctctttgtgttcattgccctgggccggtggctggaacatctggc

SEQ ID NO: 8108 - RNA, 75 nt, synthetic construct
  source 1..75: mol_type = other RNA
ccctgtgacattcttcgacacgccccccatgctctttgtgttcattgccctgggccggtggctggaacatctagc

SEQ ID NO: 8109 - RNA, 75 nt, synthetic construct
  source 1..75: mol_type = other RNA
ccctgtgacattcttcgacacgccccccatgctctttgtgttcattgccctgggccggtggctggaacatttggc

SEQ ID NO: 8110 - RNA, 75 nt, synthetic construct
  source 1..75: mol_type = other RNA
ccctgtgacattcttcgacacgccccccatgctctttgtgttcattgccctgggccggtggctggaacatcttgc

SEQ ID NO: 8111 - RNA, 75 nt, synthetic construct
  source 1..75: mol_type = other RNA
ccctgtgacattcttcgacacgccccccatgctctttgtgttcattgccctgggccggtggctggaacatctcgc

SEQ ID NO: 8112 - RNA, 75 nt, synthetic construct
  source 1..75: mol_type = other RNA
ccctgtgacattcttcgacacgccccccatgctctttgtgttcattgccctgggccggtggctggaacaccttgc

SEQ ID NO: 8113 - RNA, 75 nt, synthetic construct
  source 1..75: mol_type = other RNA
ccctgtgacattcttcgacacgccccccatgctctttgtgttcattgccctgggccggtggctggaacacctagc

SEQ ID NO: 8114 - RNA, 75 nt, synthetic construct
  source 1..75: mol_type = other RNA
ccctgtgacattcttcgacacgccccccatgctctttgtgttcattgccctgggccggtggctggaacacctcgc

SEQ ID NO: 8115 - RNA, 75 nt, synthetic construct
  source 1..75: mol_type = other RNA
ccctgtgacattcttcgacacgccccccatgctctttgtgttcattgccctgggccggtggctggaacacctggc

SEQ ID NO: 8116 - RNA, 76 nt, synthetic construct
  source 1..76: mol_type = other RNA
gccctgtgacattcttcgacacgccccccatgctctttgtgttcattgccctgggccggtggctggaacacctggc

SEQ ID NO: 8117 - RNA, 76 nt, synthetic construct
  source 1..76: mol_type = other RNA
gccctgtgacattcttcgacacgccccccatgctctttgtgttcattgccctgggccggtggctggaacatctcgc

SEQ ID NO: 8118 - RNA, 76 nt, synthetic construct
  source 1..76: mol_type = other RNA
gccctgtgacattcttcgacacgccccccatgctctttgtgttcattgccctgggccggtggctggaacatctggc

SEQ ID NO: 8119 - RNA, 76 nt, synthetic construct
  source 1..76: mol_type = other RNA
gccctgtgacattcttcgacacgccccccatgctctttgtgttcattgccctgggccggtggctggaacacttggc

SEQ ID NO: 8120 - RNA, 76 nt, synthetic construct
  source 1..76: mol_type = other RNA
gccctgtgacattcttcgacacgccccccatgctctttgtgttcattgccctgggccggtggctggaacaccttgc

SEQ ID NO: 8121 - RNA, 76 nt, synthetic construct
  source 1..76: mol_type = other RNA
gccctgtgacattcttcgacacgccccccatgctctttgtgttcattgccctgggccggtggctggaacacctagc

SEQ ID NO: 8122 - RNA, 76 nt, synthetic construct
  source 1..76: mol_type = other RNA
gccctgtgacattcttcgacacgccccccatgctctttgtgttcattgccctgggccggtggctggaacatttggc

SEQ ID NO: 8123 - RNA, 76 nt, synthetic construct
  source 1..76: mol_type = other RNA
gccctgtgacattcttcgacacgccccccatgctctttgtgttcattgccctgggccggtggctggaacacctcgc

SEQ ID NO: 8124 - RNA, 76 nt, synthetic construct
  source 1..76: mol_type = other RNA
gccctgtgacattcttcgacacgccccccatgctctttgtgttcattgccctgggccggtggctggaacatctagc

SEQ ID NO: 8125 - RNA, 76 nt, synthetic construct
  source 1..76: mol_type = other RNA
gccctgtgacattcttcgacacgccccccatgctctttgtgttcattgccctgggccggtggctggaacatcttgc

SEQ ID NO: 8126 - RNA, 77 nt, synthetic construct
  source 1..77: mol_type = other RNA
agccctgtgacattcttcgacacgccccccatgctctttgtgttcattgccctgggccggtggctggaacatctggc

SEQ ID NO: 8127 - RNA, 77 nt, synthetic construct
  source 1..77: mol_type = other RNA
agccctgtgacattcttcgacacgccccccatgctctttgtgttcattgccctgggccggtggctggaacacttggc

SEQ ID NO: 8128 - RNA, 77 nt, synthetic construct
  source 1..77: mol_type = other RNA
agccctgtgacattcttcgacacgccccccatgctctttgtgttcattgccctgggccggtggctggaacatcttgc

SEQ ID NO: 8129 - RNA, 77 nt, synthetic construct
  source 1..77: mol_type = other RNA
agccctgtgacattcttcgacacgccccccatgctctttgtgttcattgccctgggccggtggctggaacacctagc

SEQ ID NO: 8130 - RNA, 77 nt, synthetic construct
  source 1..77: mol_type = other RNA
agccctgtgacattcttcgacacgccccccatgctctttgtgttcattgccctgggccggtggctggaacatctcgc

SEQ ID NO: 8131 - RNA, 77 nt, synthetic construct
  source 1..77: mol_type = other RNA
agccctgtgacattcttcgacacgccccccatgctctttgtgttcattgccctgggccggtggctggaacacctcgc

SEQ ID NO: 8132 - RNA, 77 nt, synthetic construct
  source 1..77: mol_type = other RNA
agccctgtgacattcttcgacacgccccccatgctctttgtgttcattgccctgggccggtggctggaacaccttgc

SEQ ID NO: 8133 - RNA, 77 nt, synthetic construct
  source 1..77: mol_type = other RNA
agccctgtgacattcttcgacacgccccccatgctctttgtgttcattgccctgggccggtggctggaacatttggc

SEQ ID NO: 8134 - RNA, 77 nt, synthetic construct
  source 1..77: mol_type = other RNA
agccctgtgacattcttcgacacgccccccatgctctttgtgttcattgccctgggccggtggctggaacacctggc

SEQ ID NO: 8135 - RNA, 77 nt, synthetic construct
  source 1..77: mol_type = other RNA
agccctgtgacattcttcgacacgccccccatgctctttgtgttcattgccctgggccggtggctggaacatctagc

SEQ ID NO: 8136 - RNA, 78 nt, synthetic construct
  source 1..78: mol_type = other RNA
gagccctgtgacattcttcgacacgccccccatgctctttgtgttcattgccctgggccggtggctggaacatctggc

SEQ ID NO: 8137 - RNA, 78 nt, synthetic construct
  source 1..78: mol_type = other RNA
gagccctgtgacattcttcgacacgccccccatgctctttgtgttcattgccctgggccggtggctggaacacctcgc

SEQ ID NO: 8138 - RNA, 78 nt, synthetic construct
  source 1..78: mol_type = other RNA
gagccctgtgacattcttcgacacgccccccatgctctttgtgttcattgccctgggccggtggctggaacacctagc

SEQ ID NO: 8139 - RNA, 78 nt, synthetic construct
  source 1..78: mol_type = other RNA
gagccctgtgacattcttcgacacgccccccatgctctttgtgttcattgccctgggccggtggctggaacacttggc

SEQ ID NO: 8140 - RNA, 78 nt, synthetic construct
  source 1..78: mol_type = other RNA
gagccctgtgacattcttcgacacgccccccatgctctttgtgttcattgccctgggccggtggctggaacatttggc

SEQ ID NO: 8141 - RNA, 78 nt, synthetic construct
  source 1..78: mol_type = other RNA
gagccctgtgacattcttcgacacgccccccatgctctttgtgttcattgccctgggccggtggctggaacaccttgc

SEQ ID NO: 8142 - RNA, 78 nt, synthetic construct
  source 1..78: mol_type = other RNA
gagccctgtgacattcttcgacacgccccccatgctctttgtgttcattgccctgggccggtggctggaacatctcgc

SEQ ID NO: 8143 - RNA, 78 nt, synthetic construct
  source 1..78: mol_type = other RNA
gagccctgtgacattcttcgacacgccccccatgctctttgtgttcattgccctgggccggtggctggaacacctggc

SEQ ID NO: 8144 - RNA, 78 nt, synthetic construct
  source 1..78: mol_type = other RNA
gagccctgtgacattcttcgacacgccccccatgctctttgtgttcattgccctgggccggtggctggaacatctagc

SEQ ID NO: 8145 - RNA, 78 nt, synthetic construct
  source 1..78: mol_type = other RNA
gagccctgtgacattcttcgacacgccccccatgctctttgtgttcattgccctgggccggtggctggaacatcttgc

SEQ ID NO: 8146 - RNA, 79 nt, synthetic construct
  source 1..79: mol_type = other RNA
ggagccctgtgacattcttcgacacgccccccatgctctttgtgttcattgccctgggccggtggctggaacacttggc

SEQ ID NO: 8147 - RNA, 79 nt, synthetic construct
  source 1..79: mol_type = other RNA
ggagccctgtgacattcttcgacacgccccccatgctctttgtgttcattgccctgggccggtggctggaacaccttgc

SEQ ID NO: 8148 - RNA, 79 nt, synthetic construct
  source 1..79: mol_type = other RNA
ggagccctgtgacattcttcgacacgccccccatgctctttgtgttcattgccctgggccggtggctggaacacctagc

SEQ ID NO: 8149 - RNA, 79 nt, synthetic construct
  source 1..79: mol_type = other RNA
ggagccctgtgacattcttcgacacgccccccatgctctttgtgttcattgccctgggccggtggctggaacacctcgc

SEQ ID NO: 8150 - RNA, 79 nt, synthetic construct
  source 1..79: mol_type = other RNA
ggagccctgtgacattcttcgacacgccccccatgctctttgtgttcattgccctgggccggtggctggaacatttggc

SEQ ID NO: 8151 - RNA, 79 nt, synthetic construct
  source 1..79: mol_type = other RNA
ggagccctgtgacattcttcgacacgccccccatgctctttgtgttcattgccctgggccggtggctggaacacctggc

SEQ ID NO: 8152 - RNA, 79 nt, synthetic construct
  source 1..79: mol_type = other RNA
ggagccctgtgacattcttcgacacgccccccatgctctttgtgttcattgccctgggccggtggctggaacatctcgc

SEQ ID NO: 8153 - RNA, 79 nt, synthetic construct
  source 1..79: mol_type = other RNA
ggagccctgtgacattcttcgacacgccccccatgctctttgtgttcattgccctgggccggtggctggaacatctggc

SEQ ID NO: 8154 - RNA, 79 nt, synthetic construct
  source 1..79: mol_type = other RNA
ggagccctgtgacattcttcgacacgccccccatgctctttgtgttcattgccctgggccggtggctggaacatctagc

SEQ ID NO: 8155 - RNA, 79 nt, synthetic construct
  source 1..79: mol_type = other RNA
ggagccctgtgacattcttcgacacgccccccatgctctttgtgttcattgccctgggccggtggctggaacatcttgc

SEQ ID NO: 8156 - RNA, 80 nt, synthetic construct
  source 1..80: mol_type = other RNA
aggagccctgtgacattcttcgacacgccccccatgctctttgtgttcattgccctgggccggtggctggaacatcttgc

SEQ ID NO: 8157 - RNA, 80 nt, synthetic construct
  source 1..80: mol_type = other RNA
aggagccctgtgacattcttcgacacgccccccatgctctttgtgttcattgccctgggccggtggctggaacatttggc

SEQ ID NO: 8158 - RNA, 80 nt, synthetic construct
  source 1..80: mol_type = other RNA
aggagccctgtgacattcttcgacacgccccccatgctctttgtgttcattgccctgggccggtggctggaacacctagc

SEQ ID NO: 8159 - RNA, 80 nt, synthetic construct
  source 1..80: mol_type = other RNA
aggagccctgtgacattcttcgacacgccccccatgctctttgtgttcattgccctgggccggtggctggaacatctagc

SEQ ID NO: 8160 - RNA, 80 nt, synthetic construct
  source 1..80: mol_type = other RNA
aggagccctgtgacattcttcgacacgccccccatgctctttgtgttcattgccctgggccggtggctggaacacctggc

SEQ ID NO: 8161 - RNA, 80 nt, synthetic construct
  source 1..80: mol_type = other RNA
aggagccctgtgacattcttcgacacgccccccatgctctttgtgttcattgccctgggccggtggctggaacatctggc

SEQ ID NO: 8162 - RNA, 80 nt, synthetic construct
  source 1..80: mol_type = other RNA
aggagccctgtgacattcttcgacacgccccccatgctctttgtgttcattgccctgggccggtggctggaacacttggc

SEQ ID NO: 8163 - RNA, 80 nt, synthetic construct
  source 1..80: mol_type = other RNA
aggagccctgtgacattcttcgacacgccccccatgctctttgtgttcattgccctgggccggtggctggaacatctcgc

SEQ ID NO: 8164 - RNA, 80 nt, synthetic construct
  source 1..80: mol_type = other RNA
aggagccctgtgacattcttcgacacgccccccatgctctttgtgttcattgccctgggccggtggctggaacaccttgc

SEQ ID NO: 8165 - RNA, 80 nt, synthetic construct
  source 1..80: mol_type = other RNA
aggagccctgtgacattcttcgacacgccccccatgctctttgtgttcattgccctgggccggtggctggaacacctcgc

SEQ ID NO: 8166 - RNA, 81 nt, synthetic construct
  source 1..81: mol_type = other RNA
gaggagccctgtgacattcttcgacacgccccccatgctctttgtgttcattgccctgggccggtggctggaacatctagc

SEQ ID NO: 8167 - RNA, 81 nt, synthetic construct
  source 1..81: mol_type = other RNA
gaggagccctgtgacattcttcgacacgccccccatgctctttgtgttcattgccctgggccggtggctggaacatcttgc

SEQ ID NO: 8168 - RNA, 81 nt, synthetic construct
  source 1..81: mol_type = other RNA
gaggagccctgtgacattcttcgacacgccccccatgctctttgtgttcattgccctgggccggtggctggaacacctggc

SEQ ID NO: 8169 - RNA, 81 nt, synthetic construct
  source 1..81: mol_type = other RNA
gaggagccctgtgacattcttcgacacgccccccatgctctttgtgttcattgccctgggccggtggctggaacatctcgc

SEQ ID NO: 8170 - RNA, 81 nt, synthetic construct
  source 1..81: mol_type = other RNA
gaggagccctgtgacattcttcgacacgccccccatgctctttgtgttcattgccctgggccggtggctggaacatctggc

SEQ ID NO: 8171 - RNA, 81 nt, synthetic construct
  source 1..81: mol_type = other RNA
gaggagccctgtgacattcttcgacacgccccccatgctctttgtgttcattgccctgggccggtggctggaacacttggc

SEQ ID NO: 8172 - RNA, 81 nt, synthetic construct
  source 1..81: mol_type = other RNA
gaggagccctgtgacattcttcgacacgccccccatgctctttgtgttcattgccctgggccggtggctggaacacctagc

SEQ ID NO: 8173 - RNA, 81 nt, synthetic construct
  source 1..81: mol_type = other RNA
gaggagccctgtgacattcttcgacacgccccccatgctctttgtgttcattgccctgggccggtggctggaacaccttgc

SEQ ID NO: 8174 - RNA, 81 nt, synthetic construct
  source 1..81: mol_type = other RNA
gaggagccctgtgacattcttcgacacgccccccatgctctttgtgttcattgccctgggccggtggctggaacacctcgc

SEQ ID NO: 8175 - RNA, 81 nt, synthetic construct
  source 1..81: mol_type = other RNA
gaggagccctgtgacattcttcgacacgccccccatgctctttgtgttcattgccctgggccggtggctggaacatttggc

SEQ ID NO: 8176 - RNA, 82 nt, synthetic construct
  source 1..82: mol_type = other RNA
agaggagccctgtgacattcttcgacacgccccccatgctctttgtgttcattgccctgggccggtggctggaacacctggc

SEQ ID NO: 8177 - RNA, 82 nt, synthetic construct
  source 1..82: mol_type = other RNA
agaggagccctgtgacattcttcgacacgccccccatgctctttgtgttcattgccctgggccggtggctggaacatctagc

SEQ ID NO: 8178 - RNA, 82 nt, synthetic construct
  source 1..82: mol_type = other RNA
agaggagccctgtgacattcttcgacacgccccccatgctctttgtgttcattgccctgggccggtggctggaacacttggc

SEQ ID NO: 8179 - RNA, 82 nt, synthetic construct
  source 1..82: mol_type = other RNA
agaggagccctgtgacattcttcgacacgccccccatgctctttgtgttcattgccctgggccggtggctggaacatttggc

SEQ ID NO: 8180 - RNA, 82 nt, synthetic construct
  source 1..82: mol_type = other RNA
agaggagccctgtgacattcttcgacacgccccccatgctctttgtgttcattgccctgggccggtggctggaacatctcgc

SEQ ID NO: 8181 - RNA, 82 nt, synthetic construct
  source 1..82: mol_type = other RNA
agaggagccctgtgacattcttcgacacgccccccatgctctttgtgttcattgccctgggccggtggctggaacatcttgc

SEQ ID NO: 8182 - RNA, 82 nt, synthetic construct
  source 1..82: mol_type = other RNA
agaggagccctgtgacattcttcgacacgccccccatgctctttgtgttcattgccctgggccggtggctggaacacctcgc

SEQ ID NO: 8183 - RNA, 82 nt, synthetic construct
  source 1..82: mol_type = other RNA
agaggagccctgtgacattcttcgacacgccccccatgctctttgtgttcattgccctgggccggtggctggaacaccttgc

SEQ ID NO: 8184 - RNA, 82 nt, synthetic construct
  source 1..82: mol_type = other RNA
agaggagccctgtgacattcttcgacacgccccccatgctctttgtgttcattgccctgggccggtggctggaacacctagc

SEQ ID NO: 8185 - RNA, 82 nt, synthetic construct
  source 1..82: mol_type = other RNA
agaggagccctgtgacattcttcgacacgccccccatgctctttgtgttcattgccctgggccggtggctggaacatctggc

SEQ ID NO: 8186 - RNA, 83 nt, synthetic construct
  source 1..83: mol_type = other RNA
gagaggagccctgtgacattcttcgacacgccccccatgctctttgtgttcattgccctgggccggtggctggaacatctggc

SEQ ID NO: 8187 - RNA, 83 nt, synthetic construct
  source 1..83: mol_type = other RNA
gagaggagccctgtgacattcttcgacacgccccccatgctctttgtgttcattgccctgggccggtggctggaacaccttgc

SEQ ID NO: 8188 - RNA, 83 nt, synthetic construct
  source 1..83: mol_type = other RNA
gagaggagccctgtgacattcttcgacacgccccccatgctctttgtgttcattgccctgggccggtggctggaacatcttgc

SEQ ID NO: 8189 - RNA, 83 nt, synthetic construct
  source 1..83: mol_type = other RNA
gagaggagccctgtgacattcttcgacacgccccccatgctctttgtgttcattgccctgggccggtggctggaacatctagc

SEQ ID NO: 8190 - RNA, 83 nt, synthetic construct
  source 1..83: mol_type = other RNA
gagaggagccctgtgacattcttcgacacgccccccatgctctttgtgttcattgccctgggccggtggctggaacatttggc

SEQ ID NO: 8191 - RNA, 83 nt, synthetic construct
  source 1..83: mol_type = other RNA
gagaggagccctgtgacattcttcgacacgccccccatgctctttgtgttcattgccctgggccggtggctggaacacctagc

SEQ ID NO: 8192 - RNA, 83 nt, synthetic construct
  source 1..83: mol_type = other RNA
gagaggagccctgtgacattcttcgacacgccccccatgctctttgtgttcattgccctgggccggtggctggaacacctcgc

SEQ ID NO: 8193 - RNA, 83 nt, synthetic construct
  source 1..83: mol_type = other RNA
gagaggagccctgtgacattcttcgacacgccccccatgctctttgtgttcattgccctgggccggtggctggaacacttggc

SEQ ID NO: 8194 - RNA, 83 nt, synthetic construct
  source 1..83: mol_type = other RNA
gagaggagccctgtgacattcttcgacacgccccccatgctctttgtgttcattgccctgggccggtggctggaacacctggc

SEQ ID NO: 8195 - RNA, 83 nt, synthetic construct
  source 1..83: mol_type = other RNA
gagaggagccctgtgacattcttcgacacgccccccatgctctttgtgttcattgccctgggccggtggctggaacatctcgc

SEQ ID NO: 8196 - RNA, 84 nt, synthetic construct
  source 1..84: mol_type = other RNA
ggagaggagccctgtgacattcttcgacacgccccccatgctctttgtgttcattgccctgggccggtggctggaacatcttgc

SEQ ID NO: 8197 - RNA, 84 nt, synthetic construct
  source 1..84: mol_type = other RNA
ggagaggagccctgtgacattcttcgacacgccccccatgctctttgtgttcattgccctgggccggtggctggaacacctggc

SEQ ID NO: 8198 - RNA, 84 nt, synthetic construct
  source 1..84: mol_type = other RNA
ggagaggagccctgtgacattcttcgacacgccccccatgctctttgtgttcattgccctgggccggtggctggaacatctggc

SEQ ID NO: 8199 - RNA, 84 nt, synthetic construct
  source 1..84: mol_type = other RNA
ggagaggagccctgtgacattcttcgacacgccccccatgctctttgtgttcattgccctgggccggtggctggaacacctagc

SEQ ID NO: 8200 - RNA, 84 nt, synthetic construct
  source 1..84: mol_type = other RNA
ggagaggagccctgtgacattcttcgacacgccccccatgctctttgtgttcattgccctgggccggtggctggaacatttggc

SEQ ID NO: 8201 - RNA, 84 nt, synthetic construct
  source 1..84: mol_type = other RNA
ggagaggagccctgtgacattcttcgacacgccccccatgctctttgtgttcattgccctgggccggtggctggaacacttggc

SEQ ID NO: 8202 - RNA, 84 nt, synthetic construct
  source 1..84: mol_type = other RNA
ggagaggagccctgtgacattcttcgacacgccccccatgctctttgtgttcattgccctgggccggtggctggaacaccttgc

SEQ ID NO: 8203 - RNA, 84 nt, synthetic construct
  source 1..84: mol_type = other RNA
ggagaggagccctgtgacattcttcgacacgccccccatgctctttgtgttcattgccctgggccggtggctggaacatctagc

SEQ ID NO: 8204 - RNA, 84 nt, synthetic construct
  source 1..84: mol_type = other RNA
ggagaggagccctgtgacattcttcgacacgccccccatgctctttgtgttcattgccctgggccggtggctggaacacctcgc

SEQ ID NO: 8205 - RNA, 84 nt, synthetic construct
  source 1..84: mol_type = other RNA
ggagaggagccctgtgacattcttcgacacgccccccatgctctttgtgttcattgccctgggccggtggctggaacatctcgc

SEQ ID NO: 8206 - RNA, 85 nt, synthetic construct
  source 1..85: mol_type = other RNA
cggagaggagccctgtgacattcttcgacacgccccccatgctctttgtgttcattgccctgggccggtggctggaacacttggc

SEQ ID NO: 8207 - RNA, 85 nt, synthetic construct
  source 1..85: mol_type = other RNA
cggagaggagccctgtgacattcttcgacacgccccccatgctctttgtgttcattgccctgggccggtggctggaacatctggc

SEQ ID NO: 8208 - RNA, 85 nt, synthetic construct
  source 1..85: mol_type = other RNA
cggagaggagccctgtgacattcttcgacacgccccccatgctctttgtgttcattgccctgggccggtggctggaacatcttgc

SEQ ID NO: 8209 - RNA, 85 nt, synthetic construct
  source 1..85: mol_type = other RNA
cggagaggagccctgtgacattcttcgacacgccccccatgctctttgtgttcattgccctgggccggtggctggaacacctagc

SEQ ID NO: 8210 - RNA, 85 nt, synthetic construct
  source 1..85: mol_type = other RNA
cggagaggagccctgtgacattcttcgacacgccccccatgctctttgtgttcattgccctgggccggtggctggaacacctcgc

SEQ ID NO: 8211 - RNA, 85 nt, synthetic construct
  source 1..85: mol_type = other RNA
cggagaggagccctgtgacattcttcgacacgccccccatgctctttgtgttcattgccctgggccggtggctggaacatttggc

SEQ ID NO: 8212 - RNA, 85 nt, synthetic construct
  source 1..85: mol_type = other RNA
cggagaggagccctgtgacattcttcgacacgccccccatgctctttgtgttcattgccctgggccggtggctggaacatctcgc

SEQ ID NO: 8213 - RNA, 85 nt, synthetic construct
  source 1..85: mol_type = other RNA
cggagaggagccctgtgacattcttcgacacgccccccatgctctttgtgttcattgccctgggccggtggctggaacaccttgc

SEQ ID NO: 8214 - RNA, 85 nt, synthetic construct
  source 1..85: mol_type = other RNA
cggagaggagccctgtgacattcttcgacacgccccccatgctctttgtgttcattgccctgggccggtggctggaacacctggc

SEQ ID NO: 8215 - RNA, 85 nt, synthetic construct
  source 1..85: mol_type = other RNA
cggagaggagccctgtgacattcttcgacacgccccccatgctctttgtgttcattgccctgggccggtggctggaacatctagc

SEQ ID NO: 8216 - RNA, 86 nt, synthetic construct
  source 1..86: mol_type = other RNA
gcggagaggagccctgtgacattcttcgacacgccccccatgctctttgtgttcattgccctgggccggtggctggaacacttggc

SEQ ID NO: 8217 - RNA, 86 nt, synthetic construct
  source 1..86: mol_type = other RNA
gcggagaggagccctgtgacattcttcgacacgccccccatgctctttgtgttcattgccctgggccggtggctggaacacctggc

SEQ ID NO: 8218 - RNA, 86 nt, synthetic construct
  source 1..86: mol_type = other RNA
gcggagaggagccctgtgacattcttcgacacgccccccatgctctttgtgttcattgccctgggccggtggctggaacaccttgc

SEQ ID NO: 8219 - RNA, 86 nt, synthetic construct
  source 1..86: mol_type = other RNA
gcggagaggagccctgtgacattcttcgacacgccccccatgctctttgtgttcattgccctgggccggtggctggaacatctggc

SEQ ID NO: 8220 - RNA, 86 nt, synthetic construct
  source 1..86: mol_type = other RNA
gcggagaggagccctgtgacattcttcgacacgccccccatgctctttgtgttcattgccctgggccggtggctggaacacctcgc

SEQ ID NO: 8221 - RNA, 86 nt, synthetic construct
  source 1..86: mol_type = other RNA
gcggagaggagccctgtgacattcttcgacacgccccccatgctctttgtgttcattgccctgggccggtggctggaacacctagc

SEQ ID NO: 8222 - RNA, 86 nt, synthetic construct
  source 1..86: mol_type = other RNA
gcggagaggagccctgtgacattcttcgacacgccccccatgctctttgtgttcattgccctgggccggtggctggaacatctcgc

SEQ ID NO: 8223 - RNA, 86 nt, synthetic construct
  source 1..86: mol_type = other RNA
gcggagaggagccctgtgacattcttcgacacgccccccatgctctttgtgttcattgccctgggccggtggctggaacatttggc

SEQ ID NO: 8224 - RNA, 86 nt, synthetic construct
  source 1..86: mol_type = other RNA
gcggagaggagccctgtgacattcttcgacacgccccccatgctctttgtgttcattgccctgggccggtggctggaacatcttgc

SEQ ID NO: 8225 - RNA, 86 nt, synthetic construct
  source 1..86: mol_type = other RNA
gcggagaggagccctgtgacattcttcgacacgccccccatgctctttgtgttcattgccctgggccggtggctggaacatctagc

SEQ ID NO: 8226 - RNA, 87 nt, synthetic construct
  source 1..87: mol_type = other RNA
ggcggagaggagccctgtgacattcttcgacacgccccccatgctctttgtgttcattgccctgggccggtggctggaacatctagc

SEQ ID NO: 8227 - RNA, 87 nt, synthetic construct
  source 1..87: mol_type = other RNA
ggcggagaggagccctgtgacattcttcgacacgccccccatgctctttgtgttcattgccctgggccggtggctggaacacctcgc

SEQ ID NO: 8228 - RNA, 87 nt, synthetic construct
  source 1..87: mol_type = other RNA
ggcggagaggagccctgtgacattcttcgacacgccccccatgctctttgtgttcattgccctgggccggtggctggaacaccttgc

SEQ ID NO: 8229 - RNA, 87 nt, synthetic construct
  source 1..87: mol_type = other RNA
ggcggagaggagccctgtgacattcttcgacacgccccccatgctctttgtgttcattgccctgggccggtggctggaacacctggc

SEQ ID NO: 8230 - RNA, 87 nt, synthetic construct
  source 1..87: mol_type = other RNA
ggcggagaggagccctgtgacattcttcgacacgccccccatgctctttgtgttcattgccctgggccggtggctggaacatcttgc

SEQ ID NO: 8231 - RNA, 87 nt, synthetic construct
  source 1..87: mol_type = other RNA
ggcggagaggagccctgtgacattcttcgacacgccccccatgctctttgtgttcattgccctgggccggtggctggaacacctagc

SEQ ID NO: 8232 - RNA, 87 nt, synthetic construct
  source 1..87: mol_type = other RNA
ggcggagaggagccctgtgacattcttcgacacgccccccatgctctttgtgttcattgccctgggccggtggctggaacatctggc

SEQ ID NO: 8233 - RNA, 87 nt, synthetic construct
  source 1..87: mol_type = other RNA
ggcggagaggagccctgtgacattcttcgacacgccccccatgctctttgtgttcattgccctgggccggtggctggaacacttggc

SEQ ID NO: 8234 - RNA, 87 nt, synthetic construct
  source 1..87: mol_type = other RNA
ggcggagaggagccctgtgacattcttcgacacgccccccatgctctttgtgttcattgccctgggccggtggctggaacatctcgc

SEQ ID NO: 8235 - RNA, 87 nt, synthetic construct
  source 1..87: mol_type = other RNA
ggcggagaggagccctgtgacattcttcgacacgccccccatgctctttgtgttcattgccctgggccggtggctggaacatttggc

SEQ ID NO: 8236 - RNA, 88 nt, synthetic construct
  source 1..88: mol_type = other RNA
aggcggagaggagccctgtgacattcttcgacacgccccccatgctctttgtgttcattgccctgggccggtggctggaacacctcgc

SEQ ID NO: 8237 - RNA, 88 nt, synthetic construct
  source 1..88: mol_type = other RNA
aggcggagaggagccctgtgacattcttcgacacgccccccatgctctttgtgttcattgccctgggccggtggctggaacatctcgc

SEQ ID NO: 8238 - RNA, 88 nt, synthetic construct
  source 1..88: mol_type = other RNA
aggcggagaggagccctgtgacattcttcgacacgccccccatgctctttgtgttcattgccctgggccggtggctggaacacttggc

SEQ ID NO: 8239 - RNA, 88 nt, synthetic construct
  source 1..88: mol_type = other RNA
aggcggagaggagccctgtgacattcttcgacacgccccccatgctctttgtgttcattgccctgggccggtggctggaacatcttgc

SEQ ID NO: 8240 - RNA, 88 nt, synthetic construct
  source 1..88: mol_type = other RNA
aggcggagaggagccctgtgacattcttcgacacgccccccatgctctttgtgttcattgccctgggccggtggctggaacacctagc

SEQ ID NO: 8241 - RNA, 88 nt, synthetic construct
  source 1..88: mol_type = other RNA
aggcggagaggagccctgtgacattcttcgacacgccccccatgctctttgtgttcattgccctgggccggtggctggaacatctggc

SEQ ID NO: 8242 - RNA, 88 nt, synthetic construct
  source 1..88: mol_type = other RNA
aggcggagaggagccctgtgacattcttcgacacgccccccatgctctttgtgttcattgccctgggccggtggctggaacacctggc

SEQ ID NO: 8243 - RNA, 88 nt, synthetic construct
  source 1..88: mol_type = other RNA
aggcggagaggagccctgtgacattcttcgacacgccccccatgctctttgtgttcattgccctgggccggtggctggaacatttggc

SEQ ID NO: 8244 - RNA, 88 nt, synthetic construct
  source 1..88: mol_type = other RNA
aggcggagaggagccctgtgacattcttcgacacgccccccatgctctttgtgttcattgccctgggccggtggctggaacatctagc

SEQ ID NO: 8245 - RNA, 88 nt, synthetic construct
  source 1..88: mol_type = other RNA
aggcggagaggagccctgtgacattcttcgacacgccccccatgctctttgtgttcattgccctgggccggtggctggaacaccttgc

SEQ ID NO: 8246 - RNA, 89 nt, synthetic construct
  source 1..89: mol_type = other RNA
aaggcggagaggagccctgtgacattcttcgacacgccccccatgctctttgtgttcattgccctgggccggtggctggaacacttggc

SEQ ID NO: 8247 - RNA, 89 nt, synthetic construct
  source 1..89: mol_type = other RNA
aaggcggagaggagccctgtgacattcttcgacacgccccccatgctctttgtgttcattgccctgggccggtggctggaacatttggc

SEQ ID NO: 8248 - RNA, 89 nt, synthetic construct
  source 1..89: mol_type = other RNA
aaggcggagaggagccctgtgacattcttcgacacgccccccatgctctttgtgttcattgccctgggccggtggctggaacatcttgc

SEQ ID NO: 8249 - RNA, 89 nt, synthetic construct
  source 1..89: mol_type = other RNA
aaggcggagaggagccctgtgacattcttcgacacgccccccatgctctttgtgttcattgccctgggccggtggctggaacacctggc

SEQ ID NO: 8250 - RNA, 89 nt, synthetic construct
  source 1..89: mol_type = other RNA
aaggcggagaggagccctgtgacattcttcgacacgccccccatgctctttgtgttcattgccctgggccggtggctggaacatctggc

SEQ ID NO: 8251 - RNA, 89 nt, synthetic construct
  source 1..89: mol_type = other RNA
aaggcggagaggagccctgtgacattcttcgacacgccccccatgctctttgtgttcattgccctgggccggtggctggaacatctcgc

SEQ ID NO: 8252 - RNA, 89 nt, synthetic construct
  source 1..89: mol_type = other RNA
aaggcggagaggagccctgtgacattcttcgacacgccccccatgctctttgtgttcattgccctgggccggtggctggaacacctcgc

SEQ ID NO: 8253 - RNA, 89 nt, synthetic construct
  source 1..89: mol_type = other RNA
aaggcggagaggagccctgtgacattcttcgacacgccccccatgctctttgtgttcattgccctgggccggtggctggaacatctagc

SEQ ID NO: 8254 - RNA, 89 nt, synthetic construct
  source 1..89: mol_type = other RNA
aaggcggagaggagccctgtgacattcttcgacacgccccccatgctctttgtgttcattgccctgggccggtggctggaacaccttgc

SEQ ID NO: 8255 - RNA, 89 nt, synthetic construct
  source 1..89: mol_type = other RNA
aaggcggagaggagccctgtgacattcttcgacacgccccccatgctctttgtgttcattgccctgggccggtggctggaacacctagc

SEQ ID NO: 8256 - RNA, 90 nt, synthetic construct
  source 1..90: mol_type = other RNA
gaaggcggagaggagccctgtgacattcttcgacacgccccccatgctctttgtgttcattgccctgggccggtggctggaacatcttgc

SEQ ID NO: 8257 - RNA, 90 nt, synthetic construct
  source 1..90: mol_type = other RNA
gaaggcggagaggagccctgtgacattcttcgacacgccccccatgctctttgtgttcattgccctgggccggtggctggaacatttggc

SEQ ID NO: 8258 - RNA, 90 nt, synthetic construct
  source 1..90: mol_type = other RNA
gaaggcggagaggagccctgtgacattcttcgacacgccccccatgctctttgtgttcattgccctgggccggtggctggaacatctggc

SEQ ID NO: 8259 - RNA, 90 nt, synthetic construct
  source 1..90: mol_type = other RNA
gaaggcggagaggagccctgtgacattcttcgacacgccccccatgctctttgtgttcattgccctgggccggtggctggaacaccttgc

SEQ ID NO: 8260 - RNA, 90 nt, synthetic construct
  source 1..90: mol_type = other RNA
gaaggcggagaggagccctgtgacattcttcgacacgccccccatgctctttgtgttcattgccctgggccggtggctggaacacctggc

SEQ ID NO: 8261 - RNA, 90 nt, synthetic construct
  source 1..90: mol_type = other RNA
gaaggcggagaggagccctgtgacattcttcgacacgccccccatgctctttgtgttcattgccctgggccggtggctggaacacctcgc

SEQ ID NO: 8262 - RNA, 90 nt, synthetic construct
  source 1..90: mol_type = other RNA
gaaggcggagaggagccctgtgacattcttcgacacgccccccatgctctttgtgttcattgccctgggccggtggctggaacacttggc

SEQ ID NO: 8263 - RNA, 90 nt, synthetic construct
  source 1..90: mol_type = other RNA
gaaggcggagaggagccctgtgacattcttcgacacgccccccatgctctttgtgttcattgccctgggccggtggctggaacacctagc

SEQ ID NO: 8264 - RNA, 90 nt, synthetic construct
  source 1..90: mol_type = other RNA
gaaggcggagaggagccctgtgacattcttcgacacgccccccatgctctttgtgttcattgccctgggccggtggctggaacatctcgc

SEQ ID NO: 8265 - RNA, 90 nt, synthetic construct
  source 1..90: mol_type = other RNA
gaaggcggagaggagccctgtgacattcttcgacacgccccccatgctctttgtgttcattgccctgggccggtggctggaacatctagc

SEQ ID NO: 8266 - RNA, 91 nt, synthetic construct
  source 1..91: mol_type = other RNA
agaaggcggagaggagccctgtgacattcttcgacacgccccccatgctctttgtgttcattgccctgggccggtggctggaacacctagc

SEQ ID NO: 8267 - RNA, 91 nt, synthetic construct
  source 1..91: mol_type = other RNA
agaaggcggagaggagccctgtgacattcttcgacacgccccccatgctctttgtgttcattgccctgggccggtggctggaacatctagc

SEQ ID NO: 8268 - RNA, 91 nt, synthetic construct
  source 1..91: mol_type = other RNA
agaaggcggagaggagccctgtgacattcttcgacacgccccccatgctctttgtgttcattgccctgggccggtggctggaacatcttgc

SEQ ID NO: 8269 - RNA, 91 nt, synthetic construct
  source 1..91: mol_type = other RNA
agaaggcggagaggagccctgtgacattcttcgacacgccccccatgctctttgtgttcattgccctgggccggtggctggaacacctggc

SEQ ID NO: 8270 - RNA, 91 nt, synthetic construct
  source 1..91: mol_type = other RNA
agaaggcggagaggagccctgtgacattcttcgacacgccccccatgctctttgtgttcattgccctgggccggtggctggaacacctcgc

SEQ ID NO: 8271 - RNA, 91 nt, synthetic construct
  source 1..91: mol_type = other RNA
agaaggcggagaggagccctgtgacattcttcgacacgccccccatgctctttgtgttcattgccctgggccggtggctggaacacttggc

SEQ ID NO: 8272 - RNA, 91 nt, synthetic construct
  source 1..91: mol_type = other RNA
agaaggcggagaggagccctgtgacattcttcgacacgccccccatgctctttgtgttcattgccctgggccggtggctggaacatttggc

SEQ ID NO: 8273 - RNA, 91 nt, synthetic construct
  source 1..91: mol_type = other RNA
agaaggcggagaggagccctgtgacattcttcgacacgccccccatgctctttgtgttcattgccctgggccggtggctggaacaccttgc

SEQ ID NO: 8274 - RNA, 91 nt, synthetic construct
  source 1..91: mol_type = other RNA
agaaggcggagaggagccctgtgacattcttcgacacgccccccatgctctttgtgttcattgccctgggccggtggctggaacatctggc

SEQ ID NO: 8275 - RNA, 91 nt, synthetic construct
  source 1..91: mol_type = other RNA
agaaggcggagaggagccctgtgacattcttcgacacgccccccatgctctttgtgttcattgccctgggccggtggctggaacatctcgc

SEQ ID NO: 8276 - RNA, 92 nt, synthetic construct
  source 1..92: mol_type = other RNA
gagaaggcggagaggagccctgtgacattcttcgacacgccccccatgctctttgtgttcattgccctgggccggtggctggaacacctagc

SEQ ID NO: 8277 - RNA, 92 nt, synthetic construct
  source 1..92: mol_type = other RNA
gagaaggcggagaggagccctgtgacattcttcgacacgccccccatgctctttgtgttcattgccctgggccggtggctggaacatcttgc

SEQ ID NO: 8278 - RNA, 92 nt, synthetic construct
  source 1..92: mol_type = other RNA
gagaaggcggagaggagccctgtgacattcttcgacacgccccccatgctctttgtgttcattgccctgggccggtggctggaacatctagc

SEQ ID NO: 8279 - RNA, 92 nt, synthetic construct
  source 1..92: mol_type = other RNA
gagaaggcggagaggagccctgtgacattcttcgacacgccccccatgctctttgtgttcattgccctgggccggtggctggaacatctcgc

SEQ ID NO: 8280 - RNA, 92 nt, synthetic construct
  source 1..92: mol_type = other RNA
gagaaggcggagaggagccctgtgacattcttcgacacgccccccatgctctttgtgttcattgccctgggccggtggctggaacatttggc

SEQ ID NO: 8281 - RNA, 92 nt, synthetic construct
  source 1..92: mol_type = other RNA
gagaaggcggagaggagccctgtgacattcttcgacacgccccccatgctctttgtgttcattgccctgggccggtggctggaacatctggc

SEQ ID NO: 8282 - RNA, 92 nt, synthetic construct
  source 1..92: mol_type = other RNA
gagaaggcggagaggagccctgtgacattcttcgacacgccccccatgctctttgtgttcattgccctgggccggtggctggaacaccttgc

SEQ ID NO: 8283 - RNA, 92 nt, synthetic construct
  source 1..92: mol_type = other RNA
gagaaggcggagaggagccctgtgacattcttcgacacgccccccatgctctttgtgttcattgccctgggccggtggctggaacacttggc

SEQ ID NO: 8284 - RNA, 92 nt, synthetic construct
  source 1..92: mol_type = other RNA
gagaaggcggagaggagccctgtgacattcttcgacacgccccccatgctctttgtgttcattgccctgggccggtggctggaacacctggc

SEQ ID NO: 8285 - RNA, 92 nt, synthetic construct
  source 1..92: mol_type = other RNA
gagaaggcggagaggagccctgtgacattcttcgacacgccccccatgctctttgtgttcattgccctgggccggtggctggaacacctcgc

SEQ ID NO: 8286 - RNA, 93 nt, synthetic construct
  source 1..93: mol_type = other RNA
tgagaaggcggagaggagccctgtgacattcttcgacacgccccccatgctctttgtgttcattgccctgggccggtggctggaacatcttgc

SEQ ID NO: 8287 - RNA, 93 nt, synthetic construct
  source 1..93: mol_type = other RNA
tgagaaggcggagaggagccctgtgacattcttcgacacgccccccatgctctttgtgttcattgccctgggccggtggctggaacatctagc

SEQ ID NO: 8288 - RNA, 93 nt, synthetic construct
  source 1..93: mol_type = other RNA
tgagaaggcggagaggagccctgtgacattcttcgacacgccccccatgctctttgtgttcattgccctgggccggtggctggaacaccttgc

SEQ ID NO: 8289 - RNA, 93 nt, synthetic construct
  source 1..93: mol_type = other RNA
tgagaaggcggagaggagccctgtgacattcttcgacacgccccccatgctctttgtgttcattgccctgggccggtggctggaacacctcgc

SEQ ID NO: 8290 - RNA, 93 nt, synthetic construct
  source 1..93: mol_type = other RNA
tgagaaggcggagaggagccctgtgacattcttcgacacgccccccatgctctttgtgttcattgccctgggccggtggctggaacatttggc

SEQ ID NO: 8291 - RNA, 93 nt, synthetic construct
  source 1..93: mol_type = other RNA
tgagaaggcggagaggagccctgtgacattcttcgacacgccccccatgctctttgtgttcattgccctgggccggtggctggaacacctggc

SEQ ID NO: 8292 - RNA, 93 nt, synthetic construct
  source 1..93: mol_type = other RNA
tgagaaggcggagaggagccctgtgacattcttcgacacgccccccatgctctttgtgttcattgccctgggccggtggctggaacatctggc

SEQ ID NO: 8293 - RNA, 93 nt, synthetic construct
  source 1..93: mol_type = other RNA
tgagaaggcggagaggagccctgtgacattcttcgacacgccccccatgctctttgtgttcattgccctgggccggtggctggaacacctagc

SEQ ID NO: 8294 - RNA, 93 nt, synthetic construct
  source 1..93: mol_type = other RNA
tgagaaggcggagaggagccctgtgacattcttcgacacgccccccatgctctttgtgttcattgccctgggccggtggctggaacacttggc

SEQ ID NO: 8295 - RNA, 93 nt, synthetic construct
  source 1..93: mol_type = other RNA
tgagaaggcggagaggagccctgtgacattcttcgacacgccccccatgctctttgtgttcattgccctgggccggtggctggaacatctcgc

SEQ ID NO: 8296 - RNA, 94 nt, synthetic construct
  source 1..94: mol_type = other RNA
ctgagaaggcggagaggagccctgtgacattcttcgacacgccccccatgctctttgtgttcattgccctgggccggtggctggaacacctagc

SEQ ID NO: 8297 - RNA, 94 nt, synthetic construct
  source 1..94: mol_type = other RNA
ctgagaaggcggagaggagccctgtgacattcttcgacacgccccccatgctctttgtgttcattgccctgggccggtggctggaacaccttgc

SEQ ID NO: 8298 - RNA, 94 nt, synthetic construct
  source 1..94: mol_type = other RNA
ctgagaaggcggagaggagccctgtgacattcttcgacacgccccccatgctctttgtgttcattgccctgggccggtggctggaacacctcgc

SEQ ID NO: 8299 - RNA, 94 nt, synthetic construct
  source 1..94: mol_type = other RNA
ctgagaaggcggagaggagccctgtgacattcttcgacacgccccccatgctctttgtgttcattgccctgggccggtggctggaacatcttgc

SEQ ID NO: 8300 - RNA, 94 nt, synthetic construct
  source 1..94: mol_type = other RNA
ctgagaaggcggagaggagccctgtgacattcttcgacacgccccccatgctctttgtgttcattgccctgggccggtggctggaacatttggc

SEQ ID NO: 8301 - RNA, 94 nt, synthetic construct
  source 1..94: mol_type = other RNA
ctgagaaggcggagaggagccctgtgacattcttcgacacgccccccatgctctttgtgttcattgccctgggccggtggctggaacatctagc

SEQ ID NO: 8302 - RNA, 94 nt, synthetic construct
  source 1..94: mol_type = other RNA
ctgagaaggcggagaggagccctgtgacattcttcgacacgccccccatgctctttgtgttcattgccctgggccggtggctggaacatctggc

SEQ ID NO: 8303 - RNA, 94 nt, synthetic construct
  source 1..94: mol_type = other RNA
ctgagaaggcggagaggagccctgtgacattcttcgacacgccccccatgctctttgtgttcattgccctgggccggtggctggaacacctggc

SEQ ID NO: 8304 - RNA, 94 nt, synthetic construct
  source 1..94: mol_type = other RNA
ctgagaaggcggagaggagccctgtgacattcttcgacacgccccccatgctctttgtgttcattgccctgggccggtggctggaacatctcgc

SEQ ID NO: 8305 - RNA, 94 nt, synthetic construct
  source 1..94: mol_type = other RNA
ctgagaaggcggagaggagccctgtgacattcttcgacacgccccccatgctctttgtgttcattgccctgggccggtggctggaacacttggc

SEQ ID NO: 8306 - RNA, 95 nt, synthetic construct
  source 1..95: mol_type = other RNA
gctgagaaggcggagaggagccctgtgacattcttcgacacgccccccatgctctttgtgttcattgccctgggccggtggctggaacacttggc

SEQ ID NO: 8307 - RNA, 95 nt, synthetic construct
  source 1..95: mol_type = other RNA
gctgagaaggcggagaggagccctgtgacattcttcgacacgccccccatgctctttgtgttcattgccctgggccggtggctggaacatttggc

SEQ ID NO: 8308 - RNA, 95 nt, synthetic construct
  source 1..95: mol_type = other RNA
gctgagaaggcggagaggagccctgtgacattcttcgacacgccccccatgctctttgtgttcattgccctgggccggtggctggaacacctcgc

SEQ ID NO: 8309 - RNA, 95 nt, synthetic construct
  source 1..95: mol_type = other RNA
gctgagaaggcggagaggagccctgtgacattcttcgacacgccccccatgctctttgtgttcattgccctgggccggtggctggaacacctagc

SEQ ID NO: 8310 - RNA, 95 nt, synthetic construct
  source 1..95: mol_type = other RNA
gctgagaaggcggagaggagccctgtgacattcttcgacacgccccccatgctctttgtgttcattgccctgggccggtggctggaacatctcgc

SEQ ID NO: 8311 - RNA, 95 nt, synthetic construct
  source 1..95: mol_type = other RNA
gctgagaaggcggagaggagccctgtgacattcttcgacacgccccccatgctctttgtgttcattgccctgggccggtggctggaacaccttgc

SEQ ID NO: 8312 - RNA, 95 nt, synthetic construct
  source 1..95: mol_type = other RNA
gctgagaaggcggagaggagccctgtgacattcttcgacacgccccccatgctctttgtgttcattgccctgggccggtggctggaacatctagc

SEQ ID NO: 8313 - RNA, 95 nt, synthetic construct
  source 1..95: mol_type = other RNA
gctgagaaggcggagaggagccctgtgacattcttcgacacgccccccatgctctttgtgttcattgccctgggccggtggctggaacatcttgc

SEQ ID NO: 8314 - RNA, 95 nt, synthetic construct
  source 1..95: mol_type = other RNA
gctgagaaggcggagaggagccctgtgacattcttcgacacgccccccatgctctttgtgttcattgccctgggccggtggctggaacacctggc

SEQ ID NO: 8315 - RNA, 95 nt, synthetic construct
  source 1..95: mol_type = other RNA
gctgagaaggcggagaggagccctgtgacattcttcgacacgccccccatgctctttgtgttcattgccctgggccggtggctggaacatctggc

SEQ ID NO: 8316 - RNA, 96 nt, synthetic construct
  source 1..96: mol_type = other RNA
ggctgagaaggcggagaggagccctgtgacattcttcgacacgccccccatgctctttgtgttcattgccctgggccggtggctggaacaccttgc

SEQ ID NO: 8317 - RNA, 96 nt, synthetic construct
  source 1..96: mol_type = other RNA
ggctgagaaggcggagaggagccctgtgacattcttcgacacgccccccatgctctttgtgttcattgccctgggccggtggctggaacacctcgc

SEQ ID NO: 8318 - RNA, 96 nt, synthetic construct
  source 1..96: mol_type = other RNA
ggctgagaaggcggagaggagccctgtgacattcttcgacacgccccccatgctctttgtgttcattgccctgggccggtggctggaacatcttgc

SEQ ID NO: 8319 - RNA, 96 nt, synthetic construct
  source 1..96: mol_type = other RNA
ggctgagaaggcggagaggagccctgtgacattcttcgacacgccccccatgctctttgtgttcattgccctgggccggtggctggaacatctagc

SEQ ID NO: 8320 - RNA, 96 nt, synthetic construct
  source 1..96: mol_type = other RNA
ggctgagaaggcggagaggagccctgtgacattcttcgacacgccccccatgctctttgtgttcattgccctgggccggtggctggaacacctggc

SEQ ID NO: 8321 - RNA, 96 nt, synthetic construct
  source 1..96: mol_type = other RNA
ggctgagaaggcggagaggagccctgtgacattcttcgacacgccccccatgctctttgtgttcattgccctgggccggtggctggaacacttggc

SEQ ID NO: 8322 - RNA, 96 nt, synthetic construct
  source 1..96: mol_type = other RNA
ggctgagaaggcggagaggagccctgtgacattcttcgacacgccccccatgctctttgtgttcattgccctgggccggtggctggaacatctcgc

SEQ ID NO: 8323 - RNA, 96 nt, synthetic construct
  source 1..96: mol_type = other RNA
ggctgagaaggcggagaggagccctgtgacattcttcgacacgccccccatgctctttgtgttcattgccctgggccggtggctggaacatttggc

SEQ ID NO: 8324 - RNA, 96 nt, synthetic construct
  source 1..96: mol_type = other RNA
ggctgagaaggcggagaggagccctgtgacattcttcgacacgccccccatgctctttgtgttcattgccctgggccggtggctggaacacctagc

SEQ ID NO: 8325 - RNA, 96 nt, synthetic construct
  source 1..96: mol_type = other RNA
ggctgagaaggcggagaggagccctgtgacattcttcgacacgccccccatgctctttgtgttcattgccctgggccggtggctggaacatctggc

SEQ ID NO: 8326 - RNA, 97 nt, synthetic construct
  source 1..97: mol_type = other RNA
tggctgagaaggcggagaggagccctgtgacattcttcgacacgccccccatgctctttgtgttcattgccctgggccggtggctggaacacctggc

SEQ ID NO: 8327 - RNA, 97 nt, synthetic construct
  source 1..97: mol_type = other RNA
tggctgagaaggcggagaggagccctgtgacattcttcgacacgccccccatgctctttgtgttcattgccctgggccggtggctggaacatctagc

SEQ ID NO: 8328 - RNA, 97 nt, synthetic construct
  source 1..97: mol_type = other RNA
tggctgagaaggcggagaggagccctgtgacattcttcgacacgccccccatgctctttgtgttcattgccctgggccggtggctggaacatctcgc

SEQ ID NO: 8329 - RNA, 97 nt, synthetic construct
  source 1..97: mol_type = other RNA
tggctgagaaggcggagaggagccctgtgacattcttcgacacgccccccatgctctttgtgttcattgccctgggccggtggctggaacacctcgc

SEQ ID NO: 8330 - RNA, 97 nt, synthetic construct
  source 1..97: mol_type = other RNA
tggctgagaaggcggagaggagccctgtgacattcttcgacacgccccccatgctctttgtgttcattgccctgggccggtggctggaacatcttgc

SEQ ID NO: 8331 - RNA, 97 nt, synthetic construct
  source 1..97: mol_type = other RNA
tggctgagaaggcggagaggagccctgtgacattcttcgacacgccccccatgctctttgtgttcattgccctgggccggtggctggaacatctggc

SEQ ID NO: 8332 - RNA, 97 nt, synthetic construct
  source 1..97: mol_type = other RNA
tggctgagaaggcggagaggagccctgtgacattcttcgacacgccccccatgctctttgtgttcattgccctgggccggtggctggaacatttggc

SEQ ID NO: 8333 - RNA, 97 nt, synthetic construct
  source 1..97: mol_type = other RNA
tggctgagaaggcggagaggagccctgtgacattcttcgacacgccccccatgctctttgtgttcattgccctgggccggtggctggaacacctagc

SEQ ID NO: 8334 - RNA, 97 nt, synthetic construct
  source 1..97: mol_type = other RNA
tggctgagaaggcggagaggagccctgtgacattcttcgacacgccccccatgctctttgtgttcattgccctgggccggtggctggaacaccttgc

SEQ ID NO: 8335 - RNA, 97 nt, synthetic construct
  source 1..97: mol_type = other RNA
tggctgagaaggcggagaggagccctgtgacattcttcgacacgccccccatgctctttgtgttcattgccctgggccggtggctggaacacttggc

SEQ ID NO: 8336 - RNA, 98 nt, synthetic construct
  source 1..98: mol_type = other RNA
gtggctgagaaggcggagaggagccctgtgacattcttcgacacgccccccatgctctttgtgttcattgccctgggccggtggctggaacatttggc

SEQ ID NO: 8337 - RNA, 98 nt, synthetic construct
  source 1..98: mol_type = other RNA
gtggctgagaaggcggagaggagccctgtgacattcttcgacacgccccccatgctctttgtgttcattgccctgggccggtggctggaacaccttgc

SEQ ID NO: 8338 - RNA, 98 nt, synthetic construct
  source 1..98: mol_type = other RNA
gtggctgagaaggcggagaggagccctgtgacattcttcgacacgccccccatgctctttgtgttcattgccctgggccggtggctggaacatctagc

SEQ ID NO: 8339 - RNA, 98 nt, synthetic construct
  source 1..98: mol_type = other RNA
gtggctgagaaggcggagaggagccctgtgacattcttcgacacgccccccatgctctttgtgttcattgccctgggccggtggctggaacatcttgc

SEQ ID NO: 8340 - RNA, 98 nt, synthetic construct
  source 1..98: mol_type = other RNA
gtggctgagaaggcggagaggagccctgtgacattcttcgacacgccccccatgctctttgtgttcattgccctgggccggtggctggaacacttggc

SEQ ID NO: 8341 - RNA, 98 nt, synthetic construct
  source 1..98: mol_type = other RNA
gtggctgagaaggcggagaggagccctgtgacattcttcgacacgccccccatgctctttgtgttcattgccctgggccggtggctggaacacctagc

SEQ ID NO: 8342 - RNA, 98 nt, synthetic construct
  source 1..98: mol_type = other RNA
gtggctgagaaggcggagaggagccctgtgacattcttcgacacgccccccatgctctttgtgttcattgccctgggccggtggctggaacatctggc

SEQ ID NO: 8343 - RNA, 98 nt, synthetic construct
  source 1..98: mol_type = other RNA
gtggctgagaaggcggagaggagccctgtgacattcttcgacacgccccccatgctctttgtgttcattgccctgggccggtggctggaacacctcgc

SEQ ID NO: 8344 - RNA, 98 nt, synthetic construct
  source 1..98: mol_type = other RNA
gtggctgagaaggcggagaggagccctgtgacattcttcgacacgccccccatgctctttgtgttcattgccctgggccggtggctggaacatctcgc

SEQ ID NO: 8345 - RNA, 98 nt, synthetic construct
  source 1..98: mol_type = other RNA
gtggctgagaaggcggagaggagccctgtgacattcttcgacacgccccccatgctctttgtgttcattgccctgggccggtggctggaacacctggc

SEQ ID NO: 8346 - RNA, 99 nt, synthetic construct
  source 1..99: mol_type = other RNA
tgtggctgagaaggcggagaggagccctgtgacattcttcgacacgccccccatgctctttgtgttcattgccctgggccggtggctggaacacctggc

SEQ ID NO: 8347 - RNA, 99 nt, synthetic construct
  source 1..99: mol_type = other RNA
tgtggctgagaaggcggagaggagccctgtgacattcttcgacacgccccccatgctctttgtgttcattgccctgggccggtggctggaacatcttgc

SEQ ID NO: 8348 - RNA, 99 nt, synthetic construct
  source 1..99: mol_type = other RNA
tgtggctgagaaggcggagaggagccctgtgacattcttcgacacgccccccatgctctttgtgttcattgccctgggccggtggctggaacatctcgc

SEQ ID NO: 8349 - RNA, 99 nt, synthetic construct
  source 1..99: mol_type = other RNA
tgtggctgagaaggcggagaggagccctgtgacattcttcgacacgccccccatgctctttgtgttcattgccctgggccggtggctggaacaccttgc

SEQ ID NO: 8350 - RNA, 99 nt, synthetic construct
  source 1..99: mol_type = other RNA
tgtggctgagaaggcggagaggagccctgtgacattcttcgacacgccccccatgctctttgtgttcattgccctgggccggtggctggaacatctggc

SEQ ID NO: 8351 - RNA, 99 nt, synthetic construct
  source 1..99: mol_type = other RNA
tgtggctgagaaggcggagaggagccctgtgacattcttcgacacgccccccatgctctttgtgttcattgccctgggccggtggctggaacacctcgc

SEQ ID NO: 8352 - RNA, 99 nt, synthetic construct
  source 1..99: mol_type = other RNA
tgtggctgagaaggcggagaggagccctgtgacattcttcgacacgccccccatgctctttgtgttcattgccctgggccggtggctggaacacctagc

SEQ ID NO: 8353 - RNA, 99 nt, synthetic construct
  source 1..99: mol_type = other RNA
tgtggctgagaaggcggagaggagccctgtgacattcttcgacacgccccccatgctctttgtgttcattgccctgggccggtggctggaacacttggc

SEQ ID NO: 8354 - RNA, 99 nt, synthetic construct
  source 1..99: mol_type = other RNA
tgtggctgagaaggcggagaggagccctgtgacattcttcgacacgccccccatgctctttgtgttcattgccctgggccggtggctggaacatttggc

SEQ ID NO: 8355 - RNA, 99 nt, synthetic construct
  source 1..99: mol_type = other RNA
tgtggctgagaaggcggagaggagccctgtgacattcttcgacacgccccccatgctctttgtgttcattgccctgggccggtggctggaacatctagc

SEQ ID NO: 8356 - RNA, 100 nt, synthetic construct
  source 1..100: mol_type = other RNA
ctgtggctgagaaggcggagaggagccctgtgacattcttcgacacgccccccatgctctttgtgttcattgccctgggccggtggctggaacacctagc

SEQ ID NO: 8357 - RNA, 100 nt, synthetic construct
  source 1..100: mol_type = other RNA
ctgtggctgagaaggcggagaggagccctgtgacattcttcgacacgccccccatgctctttgtgttcattgccctgggccggtggctggaacaccttgc

SEQ ID NO: 8358 - RNA, 100 nt, synthetic construct
  source 1..100: mol_type = other RNA
ctgtggctgagaaggcggagaggagccctgtgacattcttcgacacgccccccatgctctttgtgttcattgccctgggccggtggctggaacacctcgc

SEQ ID NO: 8359 - RNA, 100 nt, synthetic construct
  source 1..100: mol_type = other RNA
ctgtggctgagaaggcggagaggagccctgtgacattcttcgacacgccccccatgctctttgtgttcattgccctgggccggtggctggaacatttggc

SEQ ID NO: 8360 - RNA, 100 nt, synthetic construct
  source 1..100: mol_type = other RNA
ctgtggctgagaaggcggagaggagccctgtgacattcttcgacacgccccccatgctctttgtgttcattgccctgggccggtggctggaacatcttgc

SEQ ID NO: 8361 - RNA, 100 nt, synthetic construct
  source 1..100: mol_type = other RNA
ctgtggctgagaaggcggagaggagccctgtgacattcttcgacacgccccccatgctctttgtgttcattgccctgggccggtggctggaacatctcgc

SEQ ID NO: 8362 - RNA, 100 nt, synthetic construct
  source 1..100: mol_type = other RNA
ctgtggctgagaaggcggagaggagccctgtgacattcttcgacacgccccccatgctctttgtgttcattgccctgggccggtggctggaacacttggc

SEQ ID NO: 8363 - RNA, 100 nt, synthetic construct
  source 1..100: mol_type = other RNA
ctgtggctgagaaggcggagaggagccctgtgacattcttcgacacgccccccatgctctttgtgttcattgccctgggccggtggctggaacatctggc

SEQ ID NO: 8364 - RNA, 100 nt, synthetic construct
  source 1..100: mol_type = other RNA
ctgtggctgagaaggcggagaggagccctgtgacattcttcgacacgccccccatgctctttgtgttcattgccctgggccggtggctggaacacctggc

SEQ ID NO: 8365 - RNA, 100 nt, synthetic construct
  source 1..100: mol_type = other RNA
ctgtggctgagaaggcggagaggagccctgtgacattcttcgacacgccccccatgctctttgtgttcattgccctgggccggtggctggaacatctagc

SEQ ID NO: 8366 - RNA, 20 nt, synthetic construct
  source 1..20: mol_type = other RNA
ggtggctggaacatcttgca

SEQ ID NO: 8367 - RNA, 20 nt, synthetic construct
  source 1..20: mol_type = other RNA
ggaacatttggcaaaggtaa

SEQ ID NO: 8368 - RNA, 20 nt, synthetic construct
  source 1..20: mol_type = other RNA
ggtggctggaacacctcgca

SEQ ID NO: 8369 - RNA, 20 nt, synthetic construct
  source 1..20: mol_type = other RNA
ggtggctggaacatttggca

SEQ ID NO: 8370 - RNA, 20 nt, synthetic construct
  source 1..20: mol_type = other RNA
ggtggctggaacatctcgca

SEQ ID NO: 8371 - RNA, 20 nt, synthetic construct
  source 1..20: mol_type = other RNA
ggtggctggaacacctggca

SEQ ID NO: 8372 - RNA, 20 nt, synthetic construct
  source 1..20: mol_type = other RNA
ggtggctggaacatctggca

SEQ ID NO: 8373 - RNA, 20 nt, synthetic construct
  source 1..20: mol_type = other RNA
ttgctgtggctgagaaggcg

SEQ ID NO: 8374 - RNA, 20 nt, synthetic construct
  source 1..20: mol_type = other RNA
gtggctgagaaggcggagag

SEQ ID NO: 8375 - RNA, 20 nt, synthetic construct
  source 1..20: mol_type = other RNA
ggtggctggaacatctagca

SEQ ID NO: 8376 - RNA, 20 nt, synthetic construct
  source 1..20: mol_type = other RNA
gctgtggctgagaaggcgga

SEQ ID NO: 8377 - RNA, 20 nt, synthetic construct
  source 1..20: mol_type = other RNA
tcctggtggttgctgtggct

SEQ ID NO: 8378 - RNA, 20 nt, synthetic construct
  source 1..20: mol_type = other RNA
ggtggctggaacacctagca

SEQ ID NO: 8379 - RNA, 20 nt, synthetic construct
  source 1..20: mol_type = other RNA
acatttggcaaaggtaacag

SEQ ID NO: 8380 - RNA, 20 nt, synthetic construct
  source 1..20: mol_type = other RNA
tggtggttgctgtggctgag

SEQ ID NO: 8381 - RNA, 20 nt, synthetic construct
  source 1..20: mol_type = other RNA
ggtggctggaacaccttgca

SEQ ID NO: 8382 - RNA, 16 nt, synthetic construct
  source 1..16: mol_type = other RNA
cctttgccaagtgttc

SEQ ID NO: 8383 - RNA, 17 nt, synthetic construct
  source 1..17: mol_type = other RNA
acctttgccaagtgttc

SEQ ID NO: 8384 - RNA, 18 nt, synthetic construct
  source 1..18: mol_type = other RNA
tacctttgccaagtgttc

SEQ ID NO: 8385 - RNA, 19 nt, synthetic construct
  source 1..19: mol_type = other RNA
ttacctttgccaagtgttc

SEQ ID NO: 8386 - RNA, 20 nt, synthetic construct
  source 1..20: mol_type = other RNA
gttacctttgccaagtgttc

SEQ ID NO: 8387 - RNA, 21 nt, synthetic construct
  source 1..21: mol_type = other RNA
tgttacctttgccaagtgttc

SEQ ID NO: 8388 - RNA, 22 nt, synthetic construct
  source 1..22: mol_type = other RNA
ctgttacctttgccaagtgttc

SEQ ID NO: 8389-8394 - skipped (6 entries)

SEQ ID NO: 8395 - RNA, 10 nt, synthetic construct
  source 1..10: mol_type = other RNA
cacttggcaa

SEQ ID NO: 8396 - RNA, 11 nt, synthetic construct
  source 1..11: mol_type = other RNA
cacttggcaaa

SEQ ID NO: 8397 - RNA, 12 nt, synthetic construct
  source 1..12: mol_type = other RNA
cacttggcaaag

SEQ ID NO: 8398 - RNA, 13 nt, synthetic construct
  source 1..13: mol_type = other RNA
cacttggcaaagg

SEQ ID NO: 8399 - RNA, 14 nt, synthetic construct
  source 1..14: mol_type = other RNA
cacttggcaaaggt

SEQ ID NO: 8400 - RNA, 15 nt, synthetic construct
  source 1..15: mol_type = other RNA
cacttggcaaaggta

SEQ ID NO: 8401 - RNA, 16 nt, synthetic construct
  source 1..16: mol_type = other RNA
cacttggcaaaggtaa

SEQ ID NO: 8402 - RNA, 17 nt, synthetic construct
  source 1..17: mol_type = other RNA
cacttggcaaaggtaac

SEQ ID NO: 8403 - RNA, 18 nt, synthetic construct
  source 1..18: mol_type = other RNA
cacttggcaaaggtaaca

SEQ ID NO: 8404 - RNA, 19 nt, synthetic construct
  source 1..19: mol_type = other RNA
cacttggcaaaggtaacag

SEQ ID NO: 8405 - RNA, 11 nt, synthetic construct
  source 1..11: mol_type = other RNA
ggtggttggaa

SEQ ID NO: 8406 - RNA, 11 nt, synthetic construct
  source 1..11: mol_type = other RNA
ggtggctggaa

SEQ ID NO: 8407 - RNA, 11 nt, synthetic construct
  source 1..11: mol_type = other RNA
ggtggttagaa

SEQ ID NO: 8408 - RNA, 12 nt, synthetic construct
  source 1..12: mol_type = other RNA
cggtggttagaa

SEQ ID NO: 8409 - RNA, 12 nt, synthetic construct
  source 1..12: mol_type = other RNA
cggtggctggaa

SEQ ID NO: 8410 - RNA, 12 nt, synthetic construct
  source 1..12: mol_type = other RNA
cggtggttggaa

SEQ ID NO: 8411 - RNA, 13 nt, synthetic construct
  source 1..13: mol_type = other RNA
ccggtggttagaa

SEQ ID NO: 8412 - RNA, 13 nt, synthetic construct
  source 1..13: mol_type = other RNA
ccggtggctggaa

SEQ ID NO: 8413 - RNA, 13 nt, synthetic construct
  source 1..13: mol_type = other RNA
ccggtggttggaa

SEQ ID NO: 8414 - RNA, 14 nt, synthetic construct
  source 1..14: mol_type = other RNA
gccggtggttggaa

SEQ ID NO: 8415 - RNA, 14 nt, synthetic construct
  source 1..14: mol_type = other RNA
gccggtggttagaa

SEQ ID NO: 8416 - RNA, 14 nt, synthetic construct
  source 1..14: mol_type = other RNA
gccggtggctggaa

SEQ ID NO: 8417 - RNA, 15 nt, synthetic construct
  source 1..15: mol_type = other RNA
ggccggtggctggaa

SEQ ID NO: 8418 - RNA, 15 nt, synthetic construct
  source 1..15: mol_type = other RNA
ggccggtggttggaa

SEQ ID NO: 8419 - RNA, 15 nt, synthetic construct
  source 1..15: mol_type = other RNA
ggccggtggttagaa

SEQ ID NO: 8420 - RNA, 16 nt, synthetic construct
  source 1..16: mol_type = other RNA
gggccggtggttagaa

SEQ ID NO: 8421 - RNA, 16 nt, synthetic construct
  source 1..16: mol_type = other RNA
gggccggtggctggaa

SEQ ID NO: 8422 - RNA, 16 nt, synthetic construct
  source 1..16: mol_type = other RNA
gggccggtggttggaa

SEQ ID NO: 8423 - RNA, 17 nt, synthetic construct
  source 1..17: mol_type = other RNA
tgggccggtggttggaa

SEQ ID NO: 8424 - RNA, 17 nt, synthetic construct
  source 1..17: mol_type = other RNA
tgggccggtggttagaa

SEQ ID NO: 8425 - RNA, 17 nt, synthetic construct
  source 1..17: mol_type = other RNA
tgggccggtggctggaa

SEQ ID NO: 8426 - RNA, 18 nt, synthetic construct
  source 1..18: mol_type = other RNA
ctgggccggtggttggaa

SEQ ID NO: 8427 - RNA, 18 nt, synthetic construct
  source 1..18: mol_type = other RNA
ctgggccggtggctggaa

SEQ ID NO: 8428 - RNA, 18 nt, synthetic construct
  source 1..18: mol_type = other RNA
ctgggccggtggttagaa

SEQ ID NO: 8429 - RNA, 19 nt, synthetic construct
  source 1..19: mol_type = other RNA
cctgggccggtggttagaa

SEQ ID NO: 8430 - RNA, 19 nt, synthetic construct
  source 1..19: mol_type = other RNA
cctgggccggtggctggaa

SEQ ID NO: 8431 - RNA, 19 nt, synthetic construct
  source 1..19: mol_type = other RNA
cctgggccggtggttggaa

SEQ ID NO: 8432 - RNA, 20 nt, synthetic construct
  source 1..20: mol_type = other RNA
ccctgggccggtggctggaa

SEQ ID NO: 8433 - RNA, 20 nt, synthetic construct
  source 1..20: mol_type = other RNA
ccctgggccggtggttggaa

SEQ ID NO: 8434 - RNA, 20 nt, synthetic construct
  source 1..20: mol_type = other RNA
ccctgggccggtggttagaa

SEQ ID NO: 8435 - RNA, 21 nt, synthetic construct
  source 1..21: mol_type = other RNA
gccctgggccggtggttggaa

SEQ ID NO: 8436 - RNA, 21 nt, synthetic construct
  source 1..21: mol_type = other RNA
gccctgggccggtggctggaa

SEQ ID NO: 8437 - RNA, 21 nt, synthetic construct
  source 1..21: mol_type = other RNA
gccctgggccggtggttagaa

SEQ ID NO: 8438 - RNA, 22 nt, synthetic construct
  source 1..22: mol_type = other RNA
tgccctgggccggtggctggaa

SEQ ID NO: 8439 - RNA, 22 nt, synthetic construct
  source 1..22: mol_type = other RNA
tgccctgggccggtggttagaa

SEQ ID NO: 8440 - RNA, 22 nt, synthetic construct
  source 1..22: mol_type = other RNA
tgccctgggccggtggttggaa

SEQ ID NO: 8441 - RNA, 23 nt, synthetic construct
  source 1..23: mol_type = other RNA
ttgccctgggccggtggctggaa

SEQ ID NO: 8442 - RNA, 23 nt, synthetic construct
  source 1..23: mol_type = other RNA
ttgccctgggccggtggttagaa

SEQ ID NO: 8443 - RNA, 23 nt, synthetic construct
  source 1..23: mol_type = other RNA
ttgccctgggccggtggttggaa

SEQ ID NO: 8444 - RNA, 24 nt, synthetic construct
  source 1..24: mol_type = other RNA
attgccctgggccggtggttggaa

SEQ ID NO: 8445 - RNA, 24 nt, synthetic construct
  source 1..24: mol_type = other RNA
attgccctgggccggtggctggaa

SEQ ID NO: 8446 - RNA, 24 nt, synthetic construct
  source 1..24: mol_type = other RNA
attgccctgggccggtggttagaa

SEQ ID NO: 8447 - RNA, 25 nt, synthetic construct
  source 1..25: mol_type = other RNA
cattgccctgggccggtggttggaa

SEQ ID NO: 8448 - RNA, 25 nt, synthetic construct
  source 1..25: mol_type = other RNA
cattgccctgggccggtggttagaa

SEQ ID NO: 8449 - RNA, 25 nt, synthetic construct
  source 1..25: mol_type = other RNA
cattgccctgggccggtggctggaa

SEQ ID NO: 8450 - RNA, 26 nt, synthetic construct
  source 1..26: mol_type = other RNA
tcattgccctgggccggtggttagaa

SEQ ID NO: 8451 - RNA, 26 nt, synthetic construct
  source 1..26: mol_type = other RNA
tcattgccctgggccggtggttggaa

SEQ ID NO: 8452 - RNA, 26 nt, synthetic construct
  source 1..26: mol_type = other RNA
tcattgccctgggccggtggctggaa

SEQ ID NO: 8453 - RNA, 27 nt, synthetic construct
  source 1..27: mol_type = other RNA
ttcattgccctgggccggtggttggaa

SEQ ID NO: 8454 - RNA, 27 nt, synthetic construct
  source 1..27: mol_type = other RNA
ttcattgccctgggccggtggttagaa

SEQ ID NO: 8455 - RNA, 27 nt, synthetic construct
  source 1..27: mol_type = other RNA
ttcattgccctgggccggtggctggaa

SEQ ID NO: 8456 - RNA, 28 nt, synthetic construct
  source 1..28: mol_type = other RNA
gttcattgccctgggccggtggttggaa

SEQ ID NO: 8457 - RNA, 28 nt, synthetic construct
  source 1..28: mol_type = other RNA
gttcattgccctgggccggtggctggaa

SEQ ID NO: 8458 - RNA, 28 nt, synthetic construct
  source 1..28: mol_type = other RNA
gttcattgccctgggccggtggttagaa

SEQ ID NO: 8459 - RNA, 29 nt, synthetic construct
  source 1..29: mol_type = other RNA
tgttcattgccctgggccggtggttagaa

SEQ ID NO: 8460 - RNA, 29 nt, synthetic construct
  source 1..29: mol_type = other RNA
tgttcattgccctgggccggtggctggaa

SEQ ID NO: 8461 - RNA, 29 nt, synthetic construct
  source 1..29: mol_type = other RNA
tgttcattgccctgggccggtggttggaa

SEQ ID NO: 8462 - RNA, 30 nt, synthetic construct
  source 1..30: mol_type = other RNA
gtgttcattgccctgggccggtggttagaa

SEQ ID NO: 8463 - RNA, 30 nt, synthetic construct
  source 1..30: mol_type = other RNA
gtgttcattgccctgggccggtggttggaa

SEQ ID NO: 8464 - RNA, 30 nt, synthetic construct
  source 1..30: mol_type = other RNA
gtgttcattgccctgggccggtggctggaa

SEQ ID NO: 8465 - RNA, 31 nt, synthetic construct
  source 1..31: mol_type = other RNA
tgtgttcattgccctgggccggtggctggaa

SEQ ID NO: 8466 - RNA, 31 nt, synthetic construct
  source 1..31: mol_type = other RNA
tgtgttcattgccctgggccggtggttagaa

SEQ ID NO: 8467 - RNA, 31 nt, synthetic construct
  source 1..31: mol_type = other RNA
tgtgttcattgccctgggccggtggttggaa

SEQ ID NO: 8468 - RNA, 32 nt, synthetic construct
  source 1..32: mol_type = other RNA
ttgtgttcattgccctgggccggtggttagaa

SEQ ID NO: 8469 - RNA, 32 nt, synthetic construct
  source 1..32: mol_type = other RNA
ttgtgttcattgccctgggccggtggctggaa

SEQ ID NO: 8470 - RNA, 32 nt, synthetic construct
  source 1..32: mol_type = other RNA
ttgtgttcattgccctgggccggtggttggaa

SEQ ID NO: 8471 - RNA, 33 nt, synthetic construct
  source 1..33: mol_type = other RNA
tttgtgttcattgccctgggccggtggttggaa

SEQ ID NO: 8472 - RNA, 33 nt, synthetic construct
  source 1..33: mol_type = other RNA
tttgtgttcattgccctgggccggtggttagaa

SEQ ID NO: 8473 - RNA, 33 nt, synthetic construct
  source 1..33: mol_type = other RNA
tttgtgttcattgccctgggccggtggctggaa

SEQ ID NO: 8474 - RNA, 34 nt, synthetic construct
  source 1..34: mol_type = other RNA
ctttgtgttcattgccctgggccggtggttggaa

SEQ ID NO: 8475 - RNA, 34 nt, synthetic construct
  source 1..34: mol_type = other RNA
ctttgtgttcattgccctgggccggtggctggaa

SEQ ID NO: 8476 - RNA, 34 nt, synthetic construct
  source 1..34: mol_type = other RNA
ctttgtgttcattgccctgggccggtggttagaa

SEQ ID NO: 8477 - RNA, 35 nt, synthetic construct
  source 1..35: mol_type = other RNA
tctttgtgttcattgccctgggccggtggttggaa

SEQ ID NO: 8478 - RNA, 35 nt, synthetic construct
  source 1..35: mol_type = other RNA
tctttgtgttcattgccctgggccggtggttagaa

SEQ ID NO: 8479 - RNA, 35 nt, synthetic construct
  source 1..35: mol_type = other RNA
tctttgtgttcattgccctgggccggtggctggaa

SEQ ID NO: 8480 - RNA, 36 nt, synthetic construct
  source 1..36: mol_type = other RNA
ctctttgtgttcattgccctgggccggtggttggaa

SEQ ID NO: 8481 - RNA, 36 nt, synthetic construct
  source 1..36: mol_type = other RNA
ctctttgtgttcattgccctgggccggtggttagaa

SEQ ID NO: 8482 - RNA, 36 nt, synthetic construct
  source 1..36: mol_type = other RNA
ctctttgtgttcattgccctgggccggtggctggaa

SEQ ID NO: 8483 - RNA, 37 nt, synthetic construct
  source 1..37: mol_type = other RNA
gctctttgtgttcattgccctgggccggtggttagaa

SEQ ID NO: 8484 - RNA, 37 nt, synthetic construct
  source 1..37: mol_type = other RNA
gctctttgtgttcattgccctgggccggtggttggaa

SEQ ID NO: 8485 - RNA, 37 nt, synthetic construct
  source 1..37: mol_type = other RNA
gctctttgtgttcattgccctgggccggtggctggaa

SEQ ID NO: 8486 - RNA, 38 nt, synthetic construct
  source 1..38: mol_type = other RNA
tgctctttgtgttcattgccctgggccggtggttggaa

SEQ ID NO: 8487 - RNA, 38 nt, synthetic construct
  source 1..38: mol_type = other RNA
tgctctttgtgttcattgccctgggccggtggctggaa

SEQ ID NO: 8488 - RNA, 38 nt, synthetic construct
  source 1..38: mol_type = other RNA
tgctctttgtgttcattgccctgggccggtggttagaa

SEQ ID NO: 8489 - RNA, 39 nt, synthetic construct
  source 1..39: mol_type = other RNA
atgctctttgtgttcattgccctgggccggtggttggaa

SEQ ID NO: 8490 - RNA, 39 nt, synthetic construct
  source 1..39: mol_type = other RNA
atgctctttgtgttcattgccctgggccggtggttagaa

SEQ ID NO: 8491 - RNA, 39 nt, synthetic construct
  source 1..39: mol_type = other RNA
atgctctttgtgttcattgccctgggccggtggctggaa

SEQ ID NO: 8492 - RNA, 40 nt, synthetic construct
  source 1..40: mol_type = other RNA
catgctctttgtgttcattgccctgggccggtggttagaa

SEQ ID NO: 8493 - RNA, 40 nt, synthetic construct
  source 1..40: mol_type = other RNA
catgctctttgtgttcattgccctgggccggtggttggaa

SEQ ID NO: 8494 - RNA, 40 nt, synthetic construct
  source 1..40: mol_type = other RNA
catgctctttgtgttcattgccctgggccggtggctggaa

SEQ ID NO: 8495 - RNA, 41 nt, synthetic construct
  source 1..41: mol_type = other RNA
ccatgctctttgtgttcattgccctgggccggtggttagaa

SEQ ID NO: 8496 - RNA, 41 nt, synthetic construct
  source 1..41: mol_type = other RNA
ccatgctctttgtgttcattgccctgggccggtggctggaa

SEQ ID NO: 8497 - RNA, 41 nt, synthetic construct
  source 1..41: mol_type = other RNA
ccatgctctttgtgttcattgccctgggccggtggttggaa

SEQ ID NO: 8498 - RNA, 42 nt, synthetic construct
  source 1..42: mol_type = other RNA
cccatgctctttgtgttcattgccctgggccggtggttggaa

SEQ ID NO: 8499 - RNA, 42 nt, synthetic construct
  source 1..42: mol_type = other RNA
cccatgctctttgtgttcattgccctgggccggtggctggaa

SEQ ID NO: 8500 - RNA, 42 nt, synthetic construct
  source 1..42: mol_type = other RNA
cccatgctctttgtgttcattgccctgggccggtggttagaa

SEQ ID NO: 8501 - RNA, 43 nt, synthetic construct
  source 1..43: mol_type = other RNA
ccccatgctctttgtgttcattgccctgggccggtggttagaa

SEQ ID NO: 8502 - RNA, 43 nt, synthetic construct
  source 1..43: mol_type = other RNA
ccccatgctctttgtgttcattgccctgggccggtggctggaa

SEQ ID NO: 8503 - RNA, 43 nt, synthetic construct
  source 1..43: mol_type = other RNA
ccccatgctctttgtgttcattgccctgggccggtggttggaa

SEQ ID NO: 8504 - RNA, 44 nt, synthetic construct
  source 1..44: mol_type = other RNA
cccccatgctctttgtgttcattgccctgggccggtggttggaa

SEQ ID NO: 8505 - RNA, 44 nt, synthetic construct
  source 1..44: mol_type = other RNA
cccccatgctctttgtgttcattgccctgggccggtggttagaa

SEQ ID NO: 8506 - RNA, 44 nt, synthetic construct
  source 1..44: mol_type = other RNA
cccccatgctctttgtgttcattgccctgggccggtggctggaa

SEQ ID NO: 8507 - RNA, 45 nt, synthetic construct
  source 1..45: mol_type = other RNA
ccccccatgctctttgtgttcattgccctgggccggtggttggaa

SEQ ID NO: 8508 - RNA, 45 nt, synthetic construct
  source 1..45: mol_type = other RNA
ccccccatgctctttgtgttcattgccctgggccggtggttagaa

SEQ ID NO: 8509 - RNA, 45 nt, synthetic construct
  source 1..45: mol_type = other RNA
ccccccatgctctttgtgttcattgccctgggccggtggctggaa

SEQ ID NO: 8510 - RNA, 46 nt, synthetic construct
  source 1..46: mol_type = other RNA
gccccccatgctctttgtgttcattgccctgggccggtggctggaa

SEQ ID NO: 8511 - RNA, 46 nt, synthetic construct
  source 1..46: mol_type = other RNA
gccccccatgctctttgtgttcattgccctgggccggtggttggaa

SEQ ID NO: 8512 - RNA, 46 nt, synthetic construct
  source 1..46: mol_type = other RNA
gccccccatgctctttgtgttcattgccctgggccggtggttagaa

SEQ ID NO: 8513 - RNA, 47 nt, synthetic construct
  source 1..47: mol_type = other RNA
cgccccccatgctctttgtgttcattgccctgggccggtggttggaa

SEQ ID NO: 8514 - RNA, 47 nt, synthetic construct
  source 1..47: mol_type = other RNA
cgccccccatgctctttgtgttcattgccctgggccggtggctggaa

SEQ ID NO: 8515 - RNA, 47 nt, synthetic construct
  source 1..47: mol_type = other RNA
cgccccccatgctctttgtgttcattgccctgggccggtggttagaa

SEQ ID NO: 8516 - RNA, 48 nt, synthetic construct
  source 1..48: mol_type = other RNA
acgccccccatgctctttgtgttcattgccctgggccggtggttagaa

SEQ ID NO: 8517 - RNA, 48 nt, synthetic construct
  source 1..48: mol_type = other RNA
acgccccccatgctctttgtgttcattgccctgggccggtggctggaa

SEQ ID NO: 8518 - RNA, 48 nt, synthetic construct
  source 1..48: mol_type = other RNA
acgccccccatgctctttgtgttcattgccctgggccggtggttggaa

SEQ ID NO: 8519 - RNA, 49 nt, synthetic construct
  source 1..49: mol_type = other RNA
cacgccccccatgctctttgtgttcattgccctgggccggtggttggaa

SEQ ID NO: 8520 - RNA, 49 nt, synthetic construct
  source 1..49: mol_type = other RNA
cacgccccccatgctctttgtgttcattgccctgggccggtggctggaa

SEQ ID NO: 8521 - RNA, 49 nt, synthetic construct
  source 1..49: mol_type = other RNA
cacgccccccatgctctttgtgttcattgccctgggccggtggttagaa

SEQ ID NO: 8522 - RNA, 50 nt, synthetic construct
  source 1..50: mol_type = other RNA
acacgccccccatgctctttgtgttcattgccctgggccggtggctggaa

SEQ ID NO: 8523 - RNA, 50 nt, synthetic construct
  source 1..50: mol_type = other RNA
acacgccccccatgctctttgtgttcattgccctgggccggtggttggaa

SEQ ID NO: 8524 - RNA, 50 nt, synthetic construct
  source 1..50: mol_type = other RNA
acacgccccccatgctctttgtgttcattgccctgggccggtggttagaa

SEQ ID NO: 8525 - RNA, 51 nt, synthetic construct
  source 1..51: mol_type = other RNA
gacacgccccccatgctctttgtgttcattgccctgggccggtggttggaa

SEQ ID NO: 8526 - RNA, 51 nt, synthetic construct
  source 1..51: mol_type = other RNA
gacacgccccccatgctctttgtgttcattgccctgggccggtggttagaa

SEQ ID NO: 8527 - RNA, 51 nt, synthetic construct
  source 1..51: mol_type = other RNA
gacacgccccccatgctctttgtgttcattgccctgggccggtggctggaa

SEQ ID NO: 8528 - RNA, 52 nt, synthetic construct
  source 1..52: mol_type = other RNA
cgacacgccccccatgctctttgtgttcattgccctgggccggtggttggaa

SEQ ID NO: 8529 - RNA, 52 nt, synthetic construct
  source 1..52: mol_type = other RNA
cgacacgccccccatgctctttgtgttcattgccctgggccggtggttagaa

SEQ ID NO: 8530 - RNA, 52 nt, synthetic construct
  source 1..52: mol_type = other RNA
cgacacgccccccatgctctttgtgttcattgccctgggccggtggctggaa

SEQ ID NO: 8531 - RNA, 53 nt, synthetic construct
  source 1..53: mol_type = other RNA
tcgacacgccccccatgctctttgtgttcattgccctgggccggtggttagaa

SEQ ID NO: 8532 - RNA, 53 nt, synthetic construct
  source 1..53: mol_type = other RNA
tcgacacgccccccatgctctttgtgttcattgccctgggccggtggttggaa

SEQ ID NO: 8533 - RNA, 53 nt, synthetic construct
  source 1..53: mol_type = other RNA
tcgacacgccccccatgctctttgtgttcattgccctgggccggtggctggaa

SEQ ID NO: 8534 - RNA, 54 nt, synthetic construct
  source 1..54: mol_type = other RNA
ttcgacacgccccccatgctctttgtgttcattgccctgggccggtggttagaa

SEQ ID NO: 8535 - RNA, 54 nt, synthetic construct
  source 1..54: mol_type = other RNA
ttcgacacgccccccatgctctttgtgttcattgccctgggccggtggttggaa

SEQ ID NO: 8536 - RNA, 54 nt, synthetic construct
  source 1..54: mol_type = other RNA
ttcgacacgccccccatgctctttgtgttcattgccctgggccggtggctggaa

SEQ ID NO: 8537 - RNA, 55 nt, synthetic construct
  source 1..55: mol_type = other RNA
cttcgacacgccccccatgctctttgtgttcattgccctgggccggtggttggaa

SEQ ID NO: 8538 - RNA, 55 nt, synthetic construct
  source 1..55: mol_type = other RNA
cttcgacacgccccccatgctctttgtgttcattgccctgggccggtggctggaa

SEQ ID NO: 8539 - RNA, 55 nt, synthetic construct
  source 1..55: mol_type = other RNA
cttcgacacgccccccatgctctttgtgttcattgccctgggccggtggttagaa

SEQ ID NO: 8540 - RNA, 56 nt, synthetic construct
  source 1..56: mol_type = other RNA
tcttcgacacgccccccatgctctttgtgttcattgccctgggccggtggttggaa

SEQ ID NO: 8541 - RNA, 56 nt, synthetic construct
  source 1..56: mol_type = other RNA
tcttcgacacgccccccatgctctttgtgttcattgccctgggccggtggctggaa

SEQ ID NO: 8542 - RNA, 56 nt, synthetic construct
  source 1..56: mol_type = other RNA
tcttcgacacgccccccatgctctttgtgttcattgccctgggccggtggttagaa

SEQ ID NO: 8543 - RNA, 57 nt, synthetic construct
  source 1..57: mol_type = other RNA
ttcttcgacacgccccccatgctctttgtgttcattgccctgggccggtggttggaa

SEQ ID NO: 8544 - RNA, 57 nt, synthetic construct
  source 1..57: mol_type = other RNA
ttcttcgacacgccccccatgctctttgtgttcattgccctgggccggtggctggaa

SEQ ID NO: 8545 - RNA, 57 nt, synthetic construct
  source 1..57: mol_type = other RNA
ttcttcgacacgccccccatgctctttgtgttcattgccctgggccggtggttagaa

SEQ ID NO: 8546 - RNA, 58 nt, synthetic construct
  source 1..58: mol_type = other RNA
attcttcgacacgccccccatgctctttgtgttcattgccctgggccggtggttagaa

SEQ ID NO: 8547 - RNA, 58 nt, synthetic construct
  source 1..58: mol_type = other RNA
attcttcgacacgccccccatgctctttgtgttcattgccctgggccggtggctggaa

SEQ ID NO: 8548 - RNA, 58 nt, synthetic construct
  source 1..58: mol_type = other RNA
attcttcgacacgccccccatgctctttgtgttcattgccctgggccggtggttggaa

SEQ ID NO: 8549 - RNA, 59 nt, synthetic construct
  source 1..59: mol_type = other RNA
cattcttcgacacgccccccatgctctttgtgttcattgccctgggccggtggttagaa

SEQ ID NO: 8550 - RNA, 59 nt, synthetic construct
  source 1..59: mol_type = other RNA
cattcttcgacacgccccccatgctctttgtgttcattgccctgggccggtggctggaa

SEQ ID NO: 8551 - RNA, 59 nt, synthetic construct
  source 1..59: mol_type = other RNA
cattcttcgacacgccccccatgctctttgtgttcattgccctgggccggtggttggaa

SEQ ID NO: 8552 - RNA, 60 nt, synthetic construct
  source 1..60: mol_type = other RNA
acattcttcgacacgccccccatgctctttgtgttcattgccctgggccggtggttagaa

SEQ ID NO: 8553 - RNA, 60 nt, synthetic construct
  source 1..60: mol_type = other RNA
acattcttcgacacgccccccatgctctttgtgttcattgccctgggccggtggctggaa

SEQ ID NO: 8554 - RNA, 60 nt, synthetic construct
  source 1..60: mol_type = other RNA
acattcttcgacacgccccccatgctctttgtgttcattgccctgggccggtggttggaa

SEQ ID NO: 8555 - RNA, 61 nt, synthetic construct
  source 1..61: mol_type = other RNA
gacattcttcgacacgccccccatgctctttgtgttcattgccctgggccggtggctggaa

SEQ ID NO: 8556 - RNA, 61 nt, synthetic construct
  source 1..61: mol_type = other RNA
gacattcttcgacacgccccccatgctctttgtgttcattgccctgggccggtggttagaa

SEQ ID NO: 8557 - RNA, 61 nt, synthetic construct
  source 1..61: mol_type = other RNA
gacattcttcgacacgccccccatgctctttgtgttcattgccctgggccggtggttggaa

SEQ ID NO: 8558 - RNA, 62 nt, synthetic construct
  source 1..62: mol_type = other RNA
tgacattcttcgacacgccccccatgctctttgtgttcattgccctgggccggtggttagaa

SEQ ID NO: 8559 - RNA, 62 nt, synthetic construct
  source 1..62: mol_type = other RNA
tgacattcttcgacacgccccccatgctctttgtgttcattgccctgggccggtggctggaa

SEQ ID NO: 8560 - RNA, 62 nt, synthetic construct
  source 1..62: mol_type = other RNA
tgacattcttcgacacgccccccatgctctttgtgttcattgccctgggccggtggttggaa

SEQ ID NO: 8561 - RNA, 63 nt, synthetic construct
  source 1..63: mol_type = other RNA
gtgacattcttcgacacgccccccatgctctttgtgttcattgccctgggccggtggttagaa

SEQ ID NO: 8562 - RNA, 63 nt, synthetic construct
  source 1..63: mol_type = other RNA
gtgacattcttcgacacgccccccatgctctttgtgttcattgccctgggccggtggttggaa

SEQ ID NO: 8563 - RNA, 63 nt, synthetic construct
  source 1..63: mol_type = other RNA
gtgacattcttcgacacgccccccatgctctttgtgttcattgccctgggccggtggctggaa

SEQ ID NO: 8564 - RNA, 64 nt, synthetic construct
  source 1..64: mol_type = other RNA
tgtgacattcttcgacacgccccccatgctctttgtgttcattgccctgggccggtggctggaa

SEQ ID NO: 8565 - RNA, 64 nt, synthetic construct
  source 1..64: mol_type = other RNA
tgtgacattcttcgacacgccccccatgctctttgtgttcattgccctgggccggtggttagaa

SEQ ID NO: 8566 - RNA, 64 nt, synthetic construct
  source 1..64: mol_type = other RNA
tgtgacattcttcgacacgccccccatgctctttgtgttcattgccctgggccggtggttggaa

SEQ ID NO: 8567 - RNA, 65 nt, synthetic construct
  source 1..65: mol_type = other RNA
ctgtgacattcttcgacacgccccccatgctctttgtgttcattgccctgggccggtggctggaa

SEQ ID NO: 8568 - RNA, 65 nt, synthetic construct
  source 1..65: mol_type = other RNA
ctgtgacattcttcgacacgccccccatgctctttgtgttcattgccctgggccggtggttagaa

SEQ ID NO: 8569 - RNA, 65 nt, synthetic construct
  source 1..65: mol_type = other RNA
ctgtgacattcttcgacacgccccccatgctctttgtgttcattgccctgggccggtggttggaa

SEQ ID NO: 8570 - RNA, 66 nt, synthetic construct
  source 1..66: mol_type = other RNA
cctgtgacattcttcgacacgccccccatgctctttgtgttcattgccctgggccggtggttggaa

SEQ ID NO: 8571 - RNA, 66 nt, synthetic construct
  source 1..66: mol_type = other RNA
cctgtgacattcttcgacacgccccccatgctctttgtgttcattgccctgggccggtggctggaa

SEQ ID NO: 8572 - RNA, 66 nt, synthetic construct
  source 1..66: mol_type = other RNA
cctgtgacattcttcgacacgccccccatgctctttgtgttcattgccctgggccggtggttagaa

SEQ ID NO: 8573 - RNA, 67 nt, synthetic construct
  source 1..67: mol_type = other RNA
ccctgtgacattcttcgacacgccccccatgctctttgtgttcattgccctgggccggtggttggaa

SEQ ID NO: 8574 - RNA, 67 nt, synthetic construct
  source 1..67: mol_type = other RNA
ccctgtgacattcttcgacacgccccccatgctctttgtgttcattgccctgggccggtggttagaa

SEQ ID NO: 8575 - RNA, 67 nt, synthetic construct
  source 1..67: mol_type = other RNA
ccctgtgacattcttcgacacgccccccatgctctttgtgttcattgccctgggccggtggctggaa

SEQ ID NO: 8576 - RNA, 68 nt, synthetic construct
  source 1..68: mol_type = other RNA
gccctgtgacattcttcgacacgccccccatgctctttgtgttcattgccctgggccggtggctggaa

SEQ ID NO: 8577 - RNA, 68 nt, synthetic construct
  source 1..68: mol_type = other RNA
gccctgtgacattcttcgacacgccccccatgctctttgtgttcattgccctgggccggtggttggaa

SEQ ID NO: 8578 - RNA, 68 nt, synthetic construct
  source 1..68: mol_type = other RNA
gccctgtgacattcttcgacacgccccccatgctctttgtgttcattgccctgggccggtggttagaa

SEQ ID NO: 8579 - RNA, 69 nt, synthetic construct
  source 1..69: mol_type = other RNA
agccctgtgacattcttcgacacgccccccatgctctttgtgttcattgccctgggccggtggttagaa

SEQ ID NO: 8580 - RNA, 69 nt, synthetic construct
  source 1..69: mol_type = other RNA
agccctgtgacattcttcgacacgccccccatgctctttgtgttcattgccctgggccggtggctggaa

SEQ ID NO: 8581 - RNA, 69 nt, synthetic construct
  source 1..69: mol_type = other RNA
agccctgtgacattcttcgacacgccccccatgctctttgtgttcattgccctgggccggtggttggaa

SEQ ID NO: 8582 - RNA, 70 nt, synthetic construct
  source 1..70: mol_type = other RNA
gagccctgtgacattcttcgacacgccccccatgctctttgtgttcattgccctgggccggtggttagaa

SEQ ID NO: 8583 - RNA, 70 nt, synthetic construct
  source 1..70: mol_type = other RNA
gagccctgtgacattcttcgacacgccccccatgctctttgtgttcattgccctgggccggtggctggaa

SEQ ID NO: 8584 - RNA, 70 nt, synthetic construct
  source 1..70: mol_type = other RNA
gagccctgtgacattcttcgacacgccccccatgctctttgtgttcattgccctgggccggtggttggaa

SEQ ID NO: 8585 - RNA, 71 nt, synthetic construct
  source 1..71: mol_type = other RNA
ggagccctgtgacattcttcgacacgccccccatgctctttgtgttcattgccctgggccggtggctggaa

SEQ ID NO: 8586 - RNA, 71 nt, synthetic construct
  source 1..71: mol_type = other RNA
ggagccctgtgacattcttcgacacgccccccatgctctttgtgttcattgccctgggccggtggttggaa

SEQ ID NO: 8587 - RNA, 71 nt, synthetic construct
  source 1..71: mol_type = other RNA
ggagccctgtgacattcttcgacacgccccccatgctctttgtgttcattgccctgggccggtggttagaa

SEQ ID NO: 8588 - RNA, 72 nt, synthetic construct
  source 1..72: mol_type = other RNA
aggagccctgtgacattcttcgacacgccccccatgctctttgtgttcattgccctgggccggtggttggaa

SEQ ID NO: 8589 - RNA, 72 nt, synthetic construct
  source 1..72: mol_type = other RNA
aggagccctgtgacattcttcgacacgccccccatgctctttgtgttcattgccctgggccggtggttagaa

SEQ ID NO: 8590 - RNA, 72 nt, synthetic construct
  source 1..72: mol_type = other RNA
aggagccctgtgacattcttcgacacgccccccatgctctttgtgttcattgccctgggccggtggctggaa

SEQ ID NO: 8591 - RNA, 73 nt, synthetic construct
  source 1..73: mol_type = other RNA
gaggagccctgtgacattcttcgacacgccccccatgctctttgtgttcattgccctgggccggtggttggaa

SEQ ID NO: 8592 - RNA, 73 nt, synthetic construct
  source 1..73: mol_type = other RNA
gaggagccctgtgacattcttcgacacgccccccatgctctttgtgttcattgccctgggccggtggctggaa

SEQ ID NO: 8593 - RNA, 73 nt, synthetic construct
  source 1..73: mol_type = other RNA
gaggagccctgtgacattcttcgacacgccccccatgctctttgtgttcattgccctgggccggtggttagaa

SEQ ID NO: 8594 - RNA, 74 nt, synthetic construct
  source 1..74: mol_type = other RNA
agaggagccctgtgacattcttcgacacgccccccatgctctttgtgttcattgccctgggccggtggttggaa

SEQ ID NO: 8595 - RNA, 74 nt, synthetic construct
  source 1..74: mol_type = other RNA
agaggagccctgtgacattcttcgacacgccccccatgctctttgtgttcattgccctgggccggtggttagaa

SEQ ID NO: 8596 - RNA, 74 nt, synthetic construct
  source 1..74: mol_type = other RNA
agaggagccctgtgacattcttcgacacgccccccatgctctttgtgttcattgccctgggccggtggctggaa

SEQ ID NO: 8597 - RNA, 75 nt, synthetic construct
  source 1..75: mol_type = other RNA
gagaggagccctgtgacattcttcgacacgccccccatgctctttgtgttcattgccctgggccggtggctggaa

SEQ ID NO: 8598 - RNA, 75 nt, synthetic construct
  source 1..75: mol_type = other RNA
gagaggagccctgtgacattcttcgacacgccccccatgctctttgtgttcattgccctgggccggtggttggaa

SEQ ID NO: 8599 - RNA, 75 nt, synthetic construct
  source 1..75: mol_type = other RNA
gagaggagccctgtgacattcttcgacacgccccccatgctctttgtgttcattgccctgggccggtggttagaa

SEQ ID NO: 8600 - RNA, 76 nt, synthetic construct
  source 1..76: mol_type = other RNA
ggagaggagccctgtgacattcttcgacacgccccccatgctctttgtgttcattgccctgggccggtggttagaa

SEQ ID NO: 8601 - RNA, 76 nt, synthetic construct
  source 1..76: mol_type = other RNA
ggagaggagccctgtgacattcttcgacacgccccccatgctctttgtgttcattgccctgggccggtggttggaa

SEQ ID NO: 8602 - RNA, 76 nt, synthetic construct
  source 1..76: mol_type = other RNA
ggagaggagccctgtgacattcttcgacacgccccccatgctctttgtgttcattgccctgggccggtggctggaa

SEQ ID NO: 8603 - RNA, 77 nt, synthetic construct
  source 1..77: mol_type = other RNA
cggagaggagccctgtgacattcttcgacacgccccccatgctctttgtgttcattgccctgggccggtggttagaa

SEQ ID NO: 8604 - RNA, 77 nt, synthetic construct
  source 1..77: mol_type = other RNA
cggagaggagccctgtgacattcttcgacacgccccccatgctctttgtgttcattgccctgggccggtggttggaa

SEQ ID NO: 8605 - RNA, 77 nt, synthetic construct
  source 1..77: mol_type = other RNA
cggagaggagccctgtgacattcttcgacacgccccccatgctctttgtgttcattgccctgggccggtggctggaa

SEQ ID NO: 8606 - RNA, 78 nt, synthetic construct
  source 1..78: mol_type = other RNA
gcggagaggagccctgtgacattcttcgacacgccccccatgctctttgtgttcattgccctgggccggtggctggaa

SEQ ID NO: 8607 - RNA, 78 nt, synthetic construct
  source 1..78: mol_type = other RNA
gcggagaggagccctgtgacattcttcgacacgccccccatgctctttgtgttcattgccctgggccggtggttagaa

SEQ ID NO: 8608 - RNA, 78 nt, synthetic construct
  source 1..78: mol_type = other RNA
gcggagaggagccctgtgacattcttcgacacgccccccatgctctttgtgttcattgccctgggccggtggttggaa

SEQ ID NO: 8609 - RNA, 79 nt, synthetic construct
  source 1..79: mol_type = other RNA
ggcggagaggagccctgtgacattcttcgacacgccccccatgctctttgtgttcattgccctgggccggtggttagaa

SEQ ID NO: 8610 - RNA, 79 nt, synthetic construct
  source 1..79: mol_type = other RNA
ggcggagaggagccctgtgacattcttcgacacgccccccatgctctttgtgttcattgccctgggccggtggttggaa

SEQ ID NO: 8611 - RNA, 79 nt, synthetic construct
  source 1..79: mol_type = other RNA
ggcggagaggagccctgtgacattcttcgacacgccccccatgctctttgtgttcattgccctgggccggtggctggaa

SEQ ID NO: 8612 - RNA, 80 nt, synthetic construct
  source 1..80: mol_type = other RNA
aggcggagaggagccctgtgacattcttcgacacgccccccatgctctttgtgttcattgccctgggccggtggttagaa

SEQ ID NO: 8613 - RNA, 80 nt, synthetic construct
  source 1..80: mol_type = other RNA
aggcggagaggagccctgtgacattcttcgacacgccccccatgctctttgtgttcattgccctgggccggtggctggaa

SEQ ID NO: 8614 - RNA, 80 nt, synthetic construct
  source 1..80: mol_type = other RNA
aggcggagaggagccctgtgacattcttcgacacgccccccatgctctttgtgttcattgccctgggccggtggttggaa

SEQ ID NO: 8615 - RNA, 81 nt, synthetic construct
  source 1..81: mol_type = other RNA
aaggcggagaggagccctgtgacattcttcgacacgccccccatgctctttgtgttcattgccctgggccggtggttggaa

SEQ ID NO: 8616 - RNA, 81 nt, synthetic construct
  source 1..81: mol_type = other RNA
aaggcggagaggagccctgtgacattcttcgacacgccccccatgctctttgtgttcattgccctgggccggtggttagaa

SEQ ID NO: 8617 - RNA, 81 nt, synthetic construct
  source 1..81: mol_type = other RNA
aaggcggagaggagccctgtgacattcttcgacacgccccccatgctctttgtgttcattgccctgggccggtggctggaa

SEQ ID NO: 8618 - RNA, 82 nt, synthetic construct
  source 1..82: mol_type = other RNA
gaaggcggagaggagccctgtgacattcttcgacacgccccccatgctctttgtgttcattgccctgggccggtggttagaa

SEQ ID NO: 8619 - RNA, 82 nt, synthetic construct
  source 1..82: mol_type = other RNA
gaaggcggagaggagccctgtgacattcttcgacacgccccccatgctctttgtgttcattgccctgggccggtggctggaa

SEQ ID NO: 8620 - RNA, 82 nt, synthetic construct
  source 1..82: mol_type = other RNA
gaaggcggagaggagccctgtgacattcttcgacacgccccccatgctctttgtgttcattgccctgggccggtggttggaa

SEQ ID NO: 8621 - RNA, 83 nt, synthetic construct
  source 1..83: mol_type = other RNA
agaaggcggagaggagccctgtgacattcttcgacacgccccccatgctctttgtgttcattgccctgggccggtggctggaa

SEQ ID NO: 8622 - RNA, 83 nt, synthetic construct
  source 1..83: mol_type = other RNA
agaaggcggagaggagccctgtgacattcttcgacacgccccccatgctctttgtgttcattgccctgggccggtggttagaa

SEQ ID NO: 8623 - RNA, 83 nt, synthetic construct
  source 1..83: mol_type = other RNA
agaaggcggagaggagccctgtgacattcttcgacacgccccccatgctctttgtgttcattgccctgggccggtggttggaa

SEQ ID NO: 8624 - RNA, 84 nt, synthetic construct
  source 1..84: mol_type = other RNA
gagaaggcggagaggagccctgtgacattcttcgacacgccccccatgctctttgtgttcattgccctgggccggtggttagaa

SEQ ID NO: 8625 - RNA, 84 nt, synthetic construct
  source 1..84: mol_type = other RNA
gagaaggcggagaggagccctgtgacattcttcgacacgccccccatgctctttgtgttcattgccctgggccggtggttggaa

SEQ ID NO: 8626 - RNA, 84 nt, synthetic construct
  source 1..84: mol_type = other RNA
gagaaggcggagaggagccctgtgacattcttcgacacgccccccatgctctttgtgttcattgccctgggccggtggctggaa

SEQ ID NO: 8627 - RNA, 85 nt, synthetic construct
  source 1..85: mol_type = other RNA
tgagaaggcggagaggagccctgtgacattcttcgacacgccccccatgctctttgtgttcattgccctgggccggtggctggaa

SEQ ID NO: 8628 - RNA, 85 nt, synthetic construct
  source 1..85: mol_type = other RNA
tgagaaggcggagaggagccctgtgacattcttcgacacgccccccatgctctttgtgttcattgccctgggccggtggttggaa

SEQ ID NO: 8629 - RNA, 85 nt, synthetic construct
  source 1..85: mol_type = other RNA
tgagaaggcggagaggagccctgtgacattcttcgacacgccccccatgctctttgtgttcattgccctgggccggtggttagaa

SEQ ID NO: 8630 - RNA, 86 nt, synthetic construct
  source 1..86: mol_type = other RNA
ctgagaaggcggagaggagccctgtgacattcttcgacacgccccccatgctctttgtgttcattgccctgggccggtggctggaa

SEQ ID NO: 8631 - RNA, 86 nt, synthetic construct
  source 1..86: mol_type = other RNA
ctgagaaggcggagaggagccctgtgacattcttcgacacgccccccatgctctttgtgttcattgccctgggccggtggttagaa

SEQ ID NO: 8632 - RNA, 86 nt, synthetic construct
  source 1..86: mol_type = other RNA
ctgagaaggcggagaggagccctgtgacattcttcgacacgccccccatgctctttgtgttcattgccctgggccggtggttggaa

SEQ ID NO: 8633 - RNA, 87 nt, synthetic construct
  source 1..87: mol_type = other RNA
gctgagaaggcggagaggagccctgtgacattcttcgacacgccccccatgctctttgtgttcattgccctgggccggtggttggaa

SEQ ID NO: 8634 - RNA, 87 nt, synthetic construct
  source 1..87: mol_type = other RNA
gctgagaaggcggagaggagccctgtgacattcttcgacacgccccccatgctctttgtgttcattgccctgggccggtggttagaa

SEQ ID NO: 8635 - RNA, 87 nt, synthetic construct
  source 1..87: mol_type = other RNA
gctgagaaggcggagaggagccctgtgacattcttcgacacgccccccatgctctttgtgttcattgccctgggccggtggctggaa

SEQ ID NO: 8636 - RNA, 88 nt, synthetic construct
  source 1..88: mol_type = other RNA
ggctgagaaggcggagaggagccctgtgacattcttcgacacgccccccatgctctttgtgttcattgccctgggccggtggttggaa

SEQ ID NO: 8637 - RNA, 88 nt, synthetic construct
  source 1..88: mol_type = other RNA
ggctgagaaggcggagaggagccctgtgacattcttcgacacgccccccatgctctttgtgttcattgccctgggccggtggctggaa

SEQ ID NO: 8638 - RNA, 88 nt, synthetic construct
  source 1..88: mol_type = other RNA
ggctgagaaggcggagaggagccctgtgacattcttcgacacgccccccatgctctttgtgttcattgccctgggccggtggttagaa

SEQ ID NO: 8639 - RNA, 89 nt, synthetic construct
  source 1..89: mol_type = other RNA
tggctgagaaggcggagaggagccctgtgacattcttcgacacgccccccatgctctttgtgttcattgccctgggccggtggctggaa

SEQ ID NO: 8640 - RNA, 89 nt, synthetic construct
  source 1..89: mol_type = other RNA
tggctgagaaggcggagaggagccctgtgacattcttcgacacgccccccatgctctttgtgttcattgccctgggccggtggttagaa

SEQ ID NO: 8641 - RNA, 89 nt, synthetic construct
  source 1..89: mol_type = other RNA
tggctgagaaggcggagaggagccctgtgacattcttcgacacgccccccatgctctttgtgttcattgccctgggccggtggttggaa

SEQ ID NO: 8642 - RNA, 90 nt, synthetic construct
  source 1..90: mol_type = other RNA
gtggctgagaaggcggagaggagccctgtgacattcttcgacacgccccccatgctctttgtgttcattgccctgggccggtggttagaa

SEQ ID NO: 8643 - RNA, 90 nt, synthetic construct
  source 1..90: mol_type = other RNA
gtggctgagaaggcggagaggagccctgtgacattcttcgacacgccccccatgctctttgtgttcattgccctgggccggtggctggaa

SEQ ID NO: 8644 - RNA, 90 nt, synthetic construct
  source 1..90: mol_type = other RNA
gtggctgagaaggcggagaggagccctgtgacattcttcgacacgccccccatgctctttgtgttcattgccctgggccggtggttggaa

SEQ ID NO: 8645 - RNA, 91 nt, synthetic construct
  source 1..91: mol_type = other RNA
tgtggctgagaaggcggagaggagccctgtgacattcttcgacacgccccccatgctctttgtgttcattgccctgggccggtggttagaa

SEQ ID NO: 8646 - RNA, 91 nt, synthetic construct
  source 1..91: mol_type = other RNA
tgtggctgagaaggcggagaggagccctgtgacattcttcgacacgccccccatgctctttgtgttcattgccctgggccggtggctggaa

SEQ ID NO: 8647 - RNA, 91 nt, synthetic construct
  source 1..91: mol_type = other RNA
tgtggctgagaaggcggagaggagccctgtgacattcttcgacacgccccccatgctctttgtgttcattgccctgggccggtggttggaa

SEQ ID NO: 8648 - RNA, 92 nt, synthetic construct
  source 1..92: mol_type = other RNA
ctgtggctgagaaggcggagaggagccctgtgacattcttcgacacgccccccatgctctttgtgttcattgccctgggccggtggttggaa

SEQ ID NO: 8649 - RNA, 92 nt, synthetic construct
  source 1..92: mol_type = other RNA
ctgtggctgagaaggcggagaggagccctgtgacattcttcgacacgccccccatgctctttgtgttcattgccctgggccggtggctggaa

SEQ ID NO: 8650 - RNA, 92 nt, synthetic construct
  source 1..92: mol_type = other RNA
ctgtggctgagaaggcggagaggagccctgtgacattcttcgacacgccccccatgctctttgtgttcattgccctgggccggtggttagaa

SEQ ID NO: 8651 - RNA, 93 nt, synthetic construct
  source 1..93: mol_type = other RNA
gctgtggctgagaaggcggagaggagccctgtgacattcttcgacacgccccccatgctctttgtgttcattgccctgggccggtggctggaa

SEQ ID NO: 8652 - RNA, 93 nt, synthetic construct
  source 1..93: mol_type = other RNA
gctgtggctgagaaggcggagaggagccctgtgacattcttcgacacgccccccatgctctttgtgttcattgccctgggccggtggttagaa

SEQ ID NO: 8653 - RNA, 93 nt, synthetic construct
  source 1..93: mol_type = other RNA
gctgtggctgagaaggcggagaggagccctgtgacattcttcgacacgccccccatgctctttgtgttcattgccctgggccggtggttggaa

SEQ ID NO: 8654 - RNA, 94 nt, synthetic construct
  source 1..94: mol_type = other RNA
tgctgtggctgagaaggcggagaggagccctgtgacattcttcgacacgccccccatgctctttgtgttcattgccctgggccggtggttagaa

SEQ ID NO: 8655 - RNA, 94 nt, synthetic construct
  source 1..94: mol_type = other RNA
tgctgtggctgagaaggcggagaggagccctgtgacattcttcgacacgccccccatgctctttgtgttcattgccctgggccggtggctggaa

SEQ ID NO: 8656 - RNA, 94 nt, synthetic construct
  source 1..94: mol_type = other RNA
tgctgtggctgagaaggcggagaggagccctgtgacattcttcgacacgccccccatgctctttgtgttcattgccctgggccggtggttggaa

SEQ ID NO: 8657 - RNA, 95 nt, synthetic construct
  source 1..95: mol_type = other RNA
ttgctgtggctgagaaggcggagaggagccctgtgacattcttcgacacgccccccatgctctttgtgttcattgccctgggccggtggctggaa

SEQ ID NO: 8658 - RNA, 95 nt, synthetic construct
  source 1..95: mol_type = other RNA
ttgctgtggctgagaaggcggagaggagccctgtgacattcttcgacacgccccccatgctctttgtgttcattgccctgggccggtggttggaa

SEQ ID NO: 8659 - RNA, 95 nt, synthetic construct
  source 1..95: mol_type = other RNA
ttgctgtggctgagaaggcggagaggagccctgtgacattcttcgacacgccccccatgctctttgtgttcattgccctgggccggtggttagaa

SEQ ID NO: 8660 - RNA, 96 nt, synthetic construct
  source 1..96: mol_type = other RNA
gttgctgtggctgagaaggcggagaggagccctgtgacattcttcgacacgccccccatgctctttgtgttcattgccctgggccggtggttggaa

SEQ ID NO: 8661 - RNA, 96 nt, synthetic construct
  source 1..96: mol_type = other RNA
gttgctgtggctgagaaggcggagaggagccctgtgacattcttcgacacgccccccatgctctttgtgttcattgccctgggccggtggctggaa

SEQ ID NO: 8662 - RNA, 96 nt, synthetic construct
  source 1..96: mol_type = other RNA
gttgctgtggctgagaaggcggagaggagccctgtgacattcttcgacacgccccccatgctctttgtgttcattgccctgggccggtggttagaa

SEQ ID NO: 8663 - RNA, 97 nt, synthetic construct
  source 1..97: mol_type = other RNA
ggttgctgtggctgagaaggcggagaggagccctgtgacattcttcgacacgccccccatgctctttgtgttcattgccctgggccggtggttagaa

SEQ ID NO: 8664 - RNA, 97 nt, synthetic construct
  source 1..97: mol_type = other RNA
ggttgctgtggctgagaaggcggagaggagccctgtgacattcttcgacacgccccccatgctctttgtgttcattgccctgggccggtggctggaa

SEQ ID NO: 8665 - RNA, 97 nt, synthetic construct
  source 1..97: mol_type = other RNA
ggttgctgtggctgagaaggcggagaggagccctgtgacattcttcgacacgccccccatgctctttgtgttcattgccctgggccggtggttggaa

SEQ ID NO: 8666 - RNA, 98 nt, synthetic construct
  source 1..98: mol_type = other RNA
tggttgctgtggctgagaaggcggagaggagccctgtgacattcttcgacacgccccccatgctctttgtgttcattgccctgggccggtggttagaa

SEQ ID NO: 8667 - RNA, 98 nt, synthetic construct
  source 1..98: mol_type = other RNA
tggttgctgtggctgagaaggcggagaggagccctgtgacattcttcgacacgccccccatgctctttgtgttcattgccctgggccggtggttggaa

SEQ ID NO: 8668 - RNA, 98 nt, synthetic construct
  source 1..98: mol_type = other RNA
tggttgctgtggctgagaaggcggagaggagccctgtgacattcttcgacacgccccccatgctctttgtgttcattgccctgggccggtggctggaa

SEQ ID NO: 8669 - RNA, 99 nt, synthetic construct
  source 1..99: mol_type = other RNA
gtggttgctgtggctgagaaggcggagaggagccctgtgacattcttcgacacgccccccatgctctttgtgttcattgccctgggccggtggctggaa

SEQ ID NO: 8670 - RNA, 99 nt, synthetic construct
  source 1..99: mol_type = other RNA
gtggttgctgtggctgagaaggcggagaggagccctgtgacattcttcgacacgccccccatgctctttgtgttcattgccctgggccggtggttagaa

SEQ ID NO: 8671 - RNA, 99 nt, synthetic construct
  source 1..99: mol_type = other RNA
gtggttgctgtggctgagaaggcggagaggagccctgtgacattcttcgacacgccccccatgctctttgtgttcattgccctgggccggtggttggaa

SEQ ID NO: 8672 - RNA, 100 nt, synthetic construct
  source 1..100: mol_type = other RNA
ggtggttgctgtggctgagaaggcggagaggagccctgtgacattcttcgacacgccccccatgctctttgtgttcattgccctgggccggtggctggaa

SEQ ID NO: 8673 - RNA, 100 nt, synthetic construct
  source 1..100: mol_type = other RNA
ggtggttgctgtggctgagaaggcggagaggagccctgtgacattcttcgacacgccccccatgctctttgtgttcattgccctgggccggtggttggaa

SEQ ID NO: 8674 - RNA, 100 nt, synthetic construct
  source 1..100: mol_type = other RNA
ggtggttgctgtggctgagaaggcggagaggagccctgtgacattcttcgacacgccccccatgctctttgtgttcattgccctgggccggtggttagaa

SEQ ID NO: 8675 - RNA, 20 nt, synthetic construct
  source 1..20: mol_type = other RNA
ggtggttggaacacttggca

SEQ ID NO: 8676 - RNA, 16 nt, synthetic construct
  source 1..16: mol_type = other RNA
ccaagtgttccagcca

SEQ ID NO: 8677 - RNA, 17 nt, synthetic construct
  source 1..17: mol_type = other RNA
gccaagtgttccagcca

SEQ ID NO: 8678 - RNA, 18 nt, synthetic construct
  source 1..18: mol_type = other RNA
tgccaagtgttccagcca

SEQ ID NO: 8679 - RNA, 19 nt, synthetic construct
  source 1..19: mol_type = other RNA
ttgccaagtgttccagcca

SEQ ID NO: 8680 - RNA, 20 nt, synthetic construct
  source 1..20: mol_type = other RNA
tttgccaagtgttccagcca

SEQ ID NO: 8681 - RNA, 21 nt, synthetic construct
  source 1..21: mol_type = other RNA
ctttgccaagtgttccagcca

SEQ ID NO: 8682 - RNA, 22 nt, synthetic construct
  source 1..22: mol_type = other RNA
cctttgccaagtgttccagcca

SEQ ID NO: 8683-8688 - skipped (6 entries)

SEQ ID NO: 8689 - RNA, 10 nt, synthetic construct
  source 1..10: mol_type = other RNA
ctggaacact

SEQ ID NO: 8690 - RNA, 11 nt, synthetic construct
  source 1..11: mol_type = other RNA
ctggaacactt

SEQ ID NO: 8691 - RNA, 12 nt, synthetic construct
  source 1..12: mol_type = other RNA
ctggaacacttg

SEQ ID NO: 8692 - RNA, 13 nt, synthetic construct
  source 1..13: mol_type = other RNA
ctggaacacttgg

SEQ ID NO: 8693 - RNA, 14 nt, synthetic construct
  source 1..14: mol_type = other RNA
ctggaacacttggc

SEQ ID NO: 8694 - RNA, 15 nt, synthetic construct
  source 1..15: mol_type = other RNA
ctggaacacttggca

SEQ ID NO: 8695 - RNA, 16 nt, synthetic construct
  source 1..16: mol_type = other RNA
ctggaacacttggcaa

SEQ ID NO: 8696 - RNA, 17 nt, synthetic construct
  source 1..17: mol_type = other RNA
ctggaacacttggcaaa

SEQ ID NO: 8697 - RNA, 18 nt, synthetic construct
  source 1..18: mol_type = other RNA
ctggaacacttggcaaag

SEQ ID NO: 8698 - RNA, 19 nt, synthetic construct
  source 1..19: mol_type = other RNA
ctggaacacttggcaaagg

SEQ ID NO: 8699 - RNA, 10 nt, synthetic construct
  source 1..10: mol_type = other RNA
gggtagatgg

SEQ ID NO: 8700 - RNA, 10 nt, synthetic construct
  source 1..10: mol_type = other RNA
gggcagatgg

SEQ ID NO: 8701 - RNA, 10 nt, synthetic construct
  source 1..10: mol_type = other RNA
gggtaggtgg

SEQ ID NO: 8702 - RNA, 10 nt, synthetic construct
  source 1..10: mol_type = other RNA
gggaagatgg

SEQ ID NO: 8703 - RNA, 10 nt, synthetic construct
  source 1..10: mol_type = other RNA
ggggaggtgg

SEQ ID NO: 8704 - RNA, 10 nt, synthetic construct
  source 1..10: mol_type = other RNA
gggaaggtgg

SEQ ID NO: 8705 - RNA, 10 nt, synthetic construct
  source 1..10: mol_type = other RNA
ggggcggtgg

SEQ ID NO: 8706 - RNA, 10 nt, synthetic construct
  source 1..10: mol_type = other RNA
gggcaggtgg

SEQ ID NO: 8707 - RNA, 10 nt, synthetic construct
  source 1..10: mol_type = other RNA
ggggagatgg

SEQ ID NO: 8708 - RNA, 10 nt, synthetic construct
  source 1..10: mol_type = other RNA
gggacggtgg

SEQ ID NO: 8709 - RNA, 10 nt, synthetic construct
  source 1..10: mol_type = other RNA
gggtcggtgg

SEQ ID NO: 8710 - RNA, 10 nt, synthetic construct
  source 1..10: mol_type = other RNA
gggccggtgg

SEQ ID NO: 8711 - RNA, 11 nt, synthetic construct
  source 1..11: mol_type = other RNA
tgggacggtgg

SEQ ID NO: 8712 - RNA, 11 nt, synthetic construct
  source 1..11: mol_type = other RNA
tgggtagatgg

SEQ ID NO: 8713 - RNA, 11 nt, synthetic construct
  source 1..11: mol_type = other RNA
tggggcggtgg

SEQ ID NO: 8714 - RNA, 11 nt, synthetic construct
  source 1..11: mol_type = other RNA
tgggcagatgg

SEQ ID NO: 8715 - RNA, 11 nt, synthetic construct
  source 1..11: mol_type = other RNA
tgggaagatgg

SEQ ID NO: 8716 - RNA, 11 nt, synthetic construct
  source 1..11: mol_type = other RNA
tggggagatgg

SEQ ID NO: 8717 - RNA, 11 nt, synthetic construct
  source 1..11: mol_type = other RNA
tgggaaggtgg

SEQ ID NO: 8718 - RNA, 11 nt, synthetic construct
  source 1..11: mol_type = other RNA
tgggccggtgg

SEQ ID NO: 8719 - RNA, 11 nt, synthetic construct
  source 1..11: mol_type = other RNA
tgggtaggtgg

SEQ ID NO: 8720 - RNA, 11 nt, synthetic construct
  source 1..11: mol_type = other RNA
tggggaggtgg

SEQ ID NO: 8721 - RNA, 11 nt, synthetic construct
  source 1..11: mol_type = other RNA
tgggcaggtgg

SEQ ID NO: 8722 - RNA, 11 nt, synthetic construct
  source 1..11: mol_type = other RNA
tgggtcggtgg

SEQ ID NO: 8723 - RNA, 12 nt, synthetic construct
  source 1..12: mol_type = other RNA
ctgggtcggtgg

SEQ ID NO: 8724 - RNA, 12 nt, synthetic construct
  source 1..12: mol_type = other RNA
ctgggaagatgg

SEQ ID NO: 8725 - RNA, 12 nt, synthetic construct
  source 1..12: mol_type = other RNA
ctggggcggtgg

SEQ ID NO: 8726 - RNA, 12 nt, synthetic construct
  source 1..12: mol_type = other RNA
ctgggcagatgg

SEQ ID NO: 8727 - RNA, 12 nt, synthetic construct
  source 1..12: mol_type = other RNA
ctggggagatgg

SEQ ID NO: 8728 - RNA, 12 nt, synthetic construct
  source 1..12: mol_type = other RNA
ctgggcaggtgg

SEQ ID NO: 8729 - RNA, 12 nt, synthetic construct
  source 1..12: mol_type = other RNA
ctgggtagatgg

SEQ ID NO: 8730 - RNA, 12 nt, synthetic construct
  source 1..12: mol_type = other RNA
ctgggccggtgg

SEQ ID NO: 8731 - RNA, 12 nt, synthetic construct
  source 1..12: mol_type = other RNA
ctgggtaggtgg

SEQ ID NO: 8732 - RNA, 12 nt, synthetic construct
  source 1..12: mol_type = other RNA
ctggggaggtgg

SEQ ID NO: 8733 - RNA, 12 nt, synthetic construct
  source 1..12: mol_type = other RNA
ctgggacggtgg

SEQ ID NO: 8734 - RNA, 12 nt, synthetic construct
  source 1..12: mol_type = other RNA
ctgggaaggtgg

SEQ ID NO: 8735 - RNA, 13 nt, synthetic construct
  source 1..13: mol_type = other RNA
cctggggaggtgg

SEQ ID NO: 8736 - RNA, 13 nt, synthetic construct
  source 1..13: mol_type = other RNA
cctggggagatgg

SEQ ID NO: 8737 - RNA, 13 nt, synthetic construct
  source 1..13: mol_type = other RNA
cctgggcaggtgg

SEQ ID NO: 8738 - RNA, 13 nt, synthetic construct
  source 1..13: mol_type = other RNA
cctggggcggtgg

SEQ ID NO: 8739 - RNA, 13 nt, synthetic construct
  source 1..13: mol_type = other RNA
cctgggtaggtgg

SEQ ID NO: 8740 - RNA, 13 nt, synthetic construct
  source 1..13: mol_type = other RNA
cctgggtagatgg

SEQ ID NO: 8741 - RNA, 13 nt, synthetic construct
  source 1..13: mol_type = other RNA
cctgggaaggtgg

SEQ ID NO: 8742 - RNA, 13 nt, synthetic construct
  source 1..13: mol_type = other RNA
cctgggtcggtgg

SEQ ID NO: 8743 - RNA, 13 nt, synthetic construct
  source 1..13: mol_type = other RNA
cctgggccggtgg

SEQ ID NO: 8744 - RNA, 13 nt, synthetic construct
  source 1..13: mol_type = other RNA
cctgggacggtgg

SEQ ID NO: 8745 - RNA, 13 nt, synthetic construct
  source 1..13: mol_type = other RNA
cctgggcagatgg

SEQ ID NO: 8746 - RNA, 13 nt, synthetic construct
  source 1..13: mol_type = other RNA
cctgggaagatgg

SEQ ID NO: 8747 - RNA, 14 nt, synthetic construct
  source 1..14: mol_type = other RNA
ccctggggaggtgg

SEQ ID NO: 8748 - RNA, 14 nt, synthetic construct
  source 1..14: mol_type = other RNA
ccctggggagatgg

SEQ ID NO: 8749 - RNA, 14 nt, synthetic construct
  source 1..14: mol_type = other RNA
ccctgggtcggtgg

SEQ ID NO: 8750 - RNA, 14 nt, synthetic construct
  source 1..14: mol_type = other RNA
ccctggggcggtgg

SEQ ID NO: 8751 - RNA, 14 nt, synthetic construct
  source 1..14: mol_type = other RNA
ccctgggcaggtgg

SEQ ID NO: 8752 - RNA, 14 nt, synthetic construct
  source 1..14: mol_type = other RNA
ccctgggccggtgg

SEQ ID NO: 8753 - RNA, 14 nt, synthetic construct
  source 1..14: mol_type = other RNA
ccctgggcagatgg

SEQ ID NO: 8754 - RNA, 14 nt, synthetic construct
  source 1..14: mol_type = other RNA
ccctgggtaggtgg

SEQ ID NO: 8755 - RNA, 14 nt, synthetic construct
  source 1..14: mol_type = other RNA
ccctgggaaggtgg

SEQ ID NO: 8756 - RNA, 14 nt, synthetic construct
  source 1..14: mol_type = other RNA
ccctgggacggtgg

SEQ ID NO: 8757 - RNA, 14 nt, synthetic construct
  source 1..14: mol_type = other RNA
ccctgggaagatgg

SEQ ID NO: 8758 - RNA, 14 nt, synthetic construct
  source 1..14: mol_type = other RNA
ccctgggtagatgg

SEQ ID NO: 8759 - RNA, 15 nt, synthetic construct
  source 1..15: mol_type = other RNA
gccctgggcaggtgg

SEQ ID NO: 8760 - RNA, 15 nt, synthetic construct
  source 1..15: mol_type = other RNA
gccctgggtagatgg

SEQ ID NO: 8761 - RNA, 15 nt, synthetic construct
  source 1..15: mol_type = other RNA
gccctgggtcggtgg

SEQ ID NO: 8762 - RNA, 15 nt, synthetic construct
  source 1..15: mol_type = other RNA
gccctgggaagatgg

SEQ ID NO: 8763 - RNA, 15 nt, synthetic construct
  source 1..15: mol_type = other RNA
gccctgggcagatgg

SEQ ID NO: 8764 - RNA, 15 nt, synthetic construct
  source 1..15: mol_type = other RNA
gccctgggccggtgg

SEQ ID NO: 8765 - RNA, 15 nt, synthetic construct
  source 1..15: mol_type = other RNA
gccctgggtaggtgg

SEQ ID NO: 8766 - RNA, 15 nt, synthetic construct
  source 1..15: mol_type = other RNA
gccctggggaggtgg

SEQ ID NO: 8767 - RNA, 15 nt, synthetic construct
  source 1..15: mol_type = other RNA
gccctggggcggtgg

SEQ ID NO: 8768 - RNA, 15 nt, synthetic construct
  source 1..15: mol_type = other RNA
gccctgggacggtgg

SEQ ID NO: 8769 - RNA, 15 nt, synthetic construct
  source 1..15: mol_type = other RNA
gccctggggagatgg

SEQ ID NO: 8770 - RNA, 15 nt, synthetic construct
  source 1..15: mol_type = other RNA
gccctgggaaggtgg

SEQ ID NO: 8771 - RNA, 16 nt, synthetic construct
  source 1..16: mol_type = other RNA
tgccctggggagatgg

SEQ ID NO: 8772 - RNA, 16 nt, synthetic construct
  source 1..16: mol_type = other RNA
tgccctgggtaggtgg

SEQ ID NO: 8773 - RNA, 16 nt, synthetic construct
  source 1..16: mol_type = other RNA
tgccctggggcggtgg

SEQ ID NO: 8774 - RNA, 16 nt, synthetic construct
  source 1..16: mol_type = other RNA
tgccctgggacggtgg

SEQ ID NO: 8775 - RNA, 16 nt, synthetic construct
  source 1..16: mol_type = other RNA
tgccctggggaggtgg

SEQ ID NO: 8776 - RNA, 16 nt, synthetic construct
  source 1..16: mol_type = other RNA
tgccctgggaagatgg

SEQ ID NO: 8777 - RNA, 16 nt, synthetic construct
  source 1..16: mol_type = other RNA
tgccctgggaaggtgg

SEQ ID NO: 8778 - RNA, 16 nt, synthetic construct
  source 1..16: mol_type = other RNA
tgccctgggtcggtgg

SEQ ID NO: 8779 - RNA, 16 nt, synthetic construct
  source 1..16: mol_type = other RNA
tgccctgggcaggtgg

SEQ ID NO: 8780 - RNA, 16 nt, synthetic construct
  source 1..16: mol_type = other RNA
tgccctgggccggtgg

SEQ ID NO: 8781 - RNA, 16 nt, synthetic construct
  source 1..16: mol_type = other RNA
tgccctgggtagatgg

SEQ ID NO: 8782 - RNA, 16 nt, synthetic construct
  source 1..16: mol_type = other RNA
tgccctgggcagatgg

SEQ ID NO: 8783 - RNA, 17 nt, synthetic construct
  source 1..17: mol_type = other RNA
ttgccctgggacggtgg

SEQ ID NO: 8784 - RNA, 17 nt, synthetic construct
  source 1..17: mol_type = other RNA
ttgccctgggaaggtgg

SEQ ID NO: 8785 - RNA, 17 nt, synthetic construct
  source 1..17: mol_type = other RNA
ttgccctgggcagatgg

SEQ ID NO: 8786 - RNA, 17 nt, synthetic construct
  source 1..17: mol_type = other RNA
ttgccctggggagatgg

SEQ ID NO: 8787 - RNA, 17 nt, synthetic construct
  source 1..17: mol_type = other RNA
ttgccctgggaagatgg

SEQ ID NO: 8788 - RNA, 17 nt, synthetic construct
  source 1..17: mol_type = other RNA
ttgccctggggaggtgg

SEQ ID NO: 8789 - RNA, 17 nt, synthetic construct
  source 1..17: mol_type = other RNA
ttgccctgggtagatgg

SEQ ID NO: 8790 - RNA, 17 nt, synthetic construct
  source 1..17: mol_type = other RNA
ttgccctgggcaggtgg

SEQ ID NO: 8791 - RNA, 17 nt, synthetic construct
  source 1..17: mol_type = other RNA
ttgccctggggcggtgg

SEQ ID NO: 8792 - RNA, 17 nt, synthetic construct
  source 1..17: mol_type = other RNA
ttgccctgggtaggtgg

SEQ ID NO: 8793 - RNA, 17 nt, synthetic construct
  source 1..17: mol_type = other RNA
ttgccctgggtcggtgg

SEQ ID NO: 8794 - RNA, 17 nt, synthetic construct
  source 1..17: mol_type = other RNA
ttgccctgggccggtgg

SEQ ID NO: 8795 - RNA, 18 nt, synthetic construct
  source 1..18: mol_type = other RNA
attgccctgggtagatgg

SEQ ID NO: 8796 - RNA, 18 nt, synthetic construct
  source 1..18: mol_type = other RNA
attgccctgggccggtgg

SEQ ID NO: 8797 - RNA, 18 nt, synthetic construct
  source 1..18: mol_type = other RNA
attgccctgggtaggtgg

SEQ ID NO: 8798 - RNA, 18 nt, synthetic construct
  source 1..18: mol_type = other RNA
attgccctgggcaggtgg

SEQ ID NO: 8799 - RNA, 18 nt, synthetic construct
  source 1..18: mol_type = other RNA
attgccctggggagatgg

SEQ ID NO: 8800 - RNA, 18 nt, synthetic construct
  source 1..18: mol_type = other RNA
attgccctgggacggtgg

SEQ ID NO: 8801 - RNA, 18 nt, synthetic construct
  source 1..18: mol_type = other RNA
attgccctgggcagatgg

SEQ ID NO: 8802 - RNA, 18 nt, synthetic construct
  source 1..18: mol_type = other RNA
attgccctgggaagatgg

SEQ ID NO: 8803 - RNA, 18 nt, synthetic construct
  source 1..18: mol_type = other RNA
attgccctgggaaggtgg

SEQ ID NO: 8804 - RNA, 18 nt, synthetic construct
  source 1..18: mol_type = other RNA
attgccctggggcggtgg

SEQ ID NO: 8805 - RNA, 18 nt, synthetic construct
  source 1..18: mol_type = other RNA
attgccctggggaggtgg

SEQ ID NO: 8806 - RNA, 18 nt, synthetic construct
  source 1..18: mol_type = other RNA
attgccctgggtcggtgg

SEQ ID NO: 8807 - RNA, 19 nt, synthetic construct
  source 1..19: mol_type = other RNA
cattgccctgggtagatgg

SEQ ID NO: 8808 - RNA, 19 nt, synthetic construct
  source 1..19: mol_type = other RNA
cattgccctgggaaggtgg

SEQ ID NO: 8809 - RNA, 19 nt, synthetic construct
  source 1..19: mol_type = other RNA
cattgccctgggaagatgg

SEQ ID NO: 8810 - RNA, 19 nt, synthetic construct
  source 1..19: mol_type = other RNA
cattgccctgggacggtgg

SEQ ID NO: 8811 - RNA, 19 nt, synthetic construct
  source 1..19: mol_type = other RNA
cattgccctgggcaggtgg

SEQ ID NO: 8812 - RNA, 19 nt, synthetic construct
  source 1..19: mol_type = other RNA
cattgccctgggcagatgg

SEQ ID NO: 8813 - RNA, 19 nt, synthetic construct
  source 1..19: mol_type = other RNA
cattgccctgggtaggtgg

SEQ ID NO: 8814 - RNA, 19 nt, synthetic construct
  source 1..19: mol_type = other RNA
cattgccctggggcggtgg

SEQ ID NO: 8815 - RNA, 19 nt, synthetic construct
  source 1..19: mol_type = other RNA
cattgccctgggccggtgg

SEQ ID NO: 8816 - RNA, 19 nt, synthetic construct
  source 1..19: mol_type = other RNA
cattgccctggggaggtgg

SEQ ID NO: 8817 - RNA, 19 nt, synthetic construct
  source 1..19: mol_type = other RNA
cattgccctgggtcggtgg

SEQ ID NO: 8818 - RNA, 19 nt, synthetic construct
  source 1..19: mol_type = other RNA
cattgccctggggagatgg

SEQ ID NO: 8819 - RNA, 20 nt, synthetic construct
  source 1..20: mol_type = other RNA
tcattgccctgggacggtgg

SEQ ID NO: 8820 - RNA, 20 nt, synthetic construct
  source 1..20: mol_type = other RNA
tcattgccctggggcggtgg

SEQ ID NO: 8821 - RNA, 20 nt, synthetic construct
  source 1..20: mol_type = other RNA
tcattgccctgggcagatgg

SEQ ID NO: 8822 - RNA, 20 nt, synthetic construct
  source 1..20: mol_type = other RNA
tcattgccctgggaaggtgg

SEQ ID NO: 8823 - RNA, 20 nt, synthetic construct
  source 1..20: mol_type = other RNA
tcattgccctggggagatgg

SEQ ID NO: 8824 - RNA, 20 nt, synthetic construct
  source 1..20: mol_type = other RNA
tcattgccctggggaggtgg

SEQ ID NO: 8825 - RNA, 20 nt, synthetic construct
  source 1..20: mol_type = other RNA
tcattgccctgggtaggtgg

SEQ ID NO: 8826 - RNA, 20 nt, synthetic construct
  source 1..20: mol_type = other RNA
tcattgccctgggaagatgg

SEQ ID NO: 8827 - RNA, 20 nt, synthetic construct
  source 1..20: mol_type = other RNA
tcattgccctgggtagatgg

SEQ ID NO: 8828 - RNA, 20 nt, synthetic construct
  source 1..20: mol_type = other RNA
tcattgccctgggccggtgg

SEQ ID NO: 8829 - RNA, 20 nt, synthetic construct
  source 1..20: mol_type = other RNA
tcattgccctgggcaggtgg

SEQ ID NO: 8830 - RNA, 20 nt, synthetic construct
  source 1..20: mol_type = other RNA
tcattgccctgggtcggtgg

SEQ ID NO: 8831 - RNA, 21 nt, synthetic construct
  source 1..21: mol_type = other RNA
ttcattgccctggggaggtgg

SEQ ID NO: 8832 - RNA, 21 nt, synthetic construct
  source 1..21: mol_type = other RNA
ttcattgccctgggcagatgg

SEQ ID NO: 8833 - RNA, 21 nt, synthetic construct
  source 1..21: mol_type = other RNA
ttcattgccctgggcaggtgg

SEQ ID NO: 8834 - RNA, 21 nt, synthetic construct
  source 1..21: mol_type = other RNA
ttcattgccctgggaaggtgg

SEQ ID NO: 8835 - RNA, 21 nt, synthetic construct
  source 1..21: mol_type = other RNA
ttcattgccctgggacggtgg

SEQ ID NO: 8836 - RNA, 21 nt, synthetic construct
  source 1..21: mol_type = other RNA
ttcattgccctgggtcggtgg

SEQ ID NO: 8837 - RNA, 21 nt, synthetic construct
  source 1..21: mol_type = other RNA
ttcattgccctgggtagatgg

SEQ ID NO: 8838 - RNA, 21 nt, synthetic construct
  source 1..21: mol_type = other RNA
ttcattgccctggggagatgg

SEQ ID NO: 8839 - RNA, 21 nt, synthetic construct
  source 1..21: mol_type = other RNA
ttcattgccctggggcggtgg

SEQ ID NO: 8840 - RNA, 21 nt, synthetic construct
  source 1..21: mol_type = other RNA
ttcattgccctgggccggtgg

SEQ ID NO: 8841 - RNA, 21 nt, synthetic construct
  source 1..21: mol_type = other RNA
ttcattgccctgggaagatgg

SEQ ID NO: 8842 - RNA, 21 nt, synthetic construct
  source 1..21: mol_type = other RNA
ttcattgccctgggtaggtgg

SEQ ID NO: 8843 - RNA, 22 nt, synthetic construct
  source 1..22: mol_type = other RNA
gttcattgccctggggaggtgg

SEQ ID NO: 8844 - RNA, 22 nt, synthetic construct
  source 1..22: mol_type = other RNA
gttcattgccctgggtaggtgg

SEQ ID NO: 8845 - RNA, 22 nt, synthetic construct
  source 1..22: mol_type = other RNA
gttcattgccctgggaaggtgg

SEQ ID NO: 8846 - RNA, 22 nt, synthetic construct
  source 1..22: mol_type = other RNA
gttcattgccctgggacggtgg

SEQ ID NO: 8847 - RNA, 22 nt, synthetic construct
  source 1..22: mol_type = other RNA
gttcattgccctgggaagatgg

SEQ ID NO: 8848 - RNA, 22 nt, synthetic construct
  source 1..22: mol_type = other RNA
gttcattgccctgggcagatgg

SEQ ID NO: 8849 - RNA, 22 nt, synthetic construct
  source 1..22: mol_type = other RNA
gttcattgccctgggtagatgg

SEQ ID NO: 8850 - RNA, 22 nt, synthetic construct
  source 1..22: mol_type = other RNA
gttcattgccctgggccggtgg

SEQ ID NO: 8851 - RNA, 22 nt, synthetic construct
  source 1..22: mol_type = other RNA
gttcattgccctggggagatgg

SEQ ID NO: 8852 - RNA, 22 nt, synthetic construct
  source 1..22: mol_type = other RNA
gttcattgccctgggtcggtgg

SEQ ID NO: 8853 - RNA, 22 nt, synthetic construct
  source 1..22: mol_type = other RNA
gttcattgccctggggcggtgg

SEQ ID NO: 8854 - RNA, 22 nt, synthetic construct
  source 1..22: mol_type = other RNA
gttcattgccctgggcaggtgg

SEQ ID NO: 8855 - RNA, 23 nt, synthetic construct
  source 1..23: mol_type = other RNA
tgttcattgccctgggtcggtgg

SEQ ID NO: 8856 - RNA, 23 nt, synthetic construct
  source 1..23: mol_type = other RNA
tgttcattgccctggggaggtgg

SEQ ID NO: 8857 - RNA, 23 nt, synthetic construct
  source 1..23: mol_type = other RNA
tgttcattgccctgggccggtgg

SEQ ID NO: 8858 - RNA, 23 nt, synthetic construct
  source 1..23: mol_type = other RNA
tgttcattgccctgggcaggtgg

SEQ ID NO: 8859 - RNA, 23 nt, synthetic construct
  source 1..23: mol_type = other RNA
tgttcattgccctggggcggtgg

SEQ ID NO: 8860 - RNA, 23 nt, synthetic construct
  source 1..23: mol_type = other RNA
tgttcattgccctgggtagatgg

SEQ ID NO: 8861 - RNA, 23 nt, synthetic construct
  source 1..23: mol_type = other RNA
tgttcattgccctggggagatgg

SEQ ID NO: 8862 - RNA, 23 nt, synthetic construct
  source 1..23: mol_type = other RNA
tgttcattgccctgggaaggtgg

SEQ ID NO: 8863 - RNA, 23 nt, synthetic construct
  source 1..23: mol_type = other RNA
tgttcattgccctgggaagatgg

SEQ ID NO: 8864 - RNA, 23 nt, synthetic construct
  source 1..23: mol_type = other RNA
tgttcattgccctgggtaggtgg

SEQ ID NO: 8865 - RNA, 23 nt, synthetic construct
  source 1..23: mol_type = other RNA
tgttcattgccctgggcagatgg

SEQ ID NO: 8866 - RNA, 23 nt, synthetic construct
  source 1..23: mol_type = other RNA
tgttcattgccctgggacggtgg

SEQ ID NO: 8867 - RNA, 24 nt, synthetic construct
  source 1..24: mol_type = other RNA
gtgttcattgccctgggtagatgg

SEQ ID NO: 8868 - RNA, 24 nt, synthetic construct
  source 1..24: mol_type = other RNA
gtgttcattgccctgggcagatgg

SEQ ID NO: 8869 - RNA, 24 nt, synthetic construct
  source 1..24: mol_type = other RNA
gtgttcattgccctgggcaggtgg

SEQ ID NO: 8870 - RNA, 24 nt, synthetic construct
  source 1..24: mol_type = other RNA
gtgttcattgccctgggaagatgg

SEQ ID NO: 8871 - RNA, 24 nt, synthetic construct
  source 1..24: mol_type = other RNA
gtgttcattgccctgggaaggtgg

SEQ ID NO: 8872 - RNA, 24 nt, synthetic construct
  source 1..24: mol_type = other RNA
gtgttcattgccctgggtcggtgg

SEQ ID NO: 8873 - RNA, 24 nt, synthetic construct
  source 1..24: mol_type = other RNA
gtgttcattgccctgggacggtgg

SEQ ID NO: 8874 - RNA, 24 nt, synthetic construct
  source 1..24: mol_type = other RNA
gtgttcattgccctgggccggtgg

SEQ ID NO: 8875 - RNA, 24 nt, synthetic construct
  source 1..24: mol_type = other RNA
gtgttcattgccctggggagatgg

SEQ ID NO: 8876 - RNA, 24 nt, synthetic construct
  source 1..24: mol_type = other RNA
gtgttcattgccctggggaggtgg

SEQ ID NO: 8877 - RNA, 24 nt, synthetic construct
  source 1..24: mol_type = other RNA
gtgttcattgccctggggcggtgg

SEQ ID NO: 8878 - RNA, 24 nt, synthetic construct
  source 1..24: mol_type = other RNA
gtgttcattgccctgggtaggtgg

SEQ ID NO: 8879 - RNA, 25 nt, synthetic construct
  source 1..25: mol_type = other RNA
tgtgttcattgccctgggtcggtgg

SEQ ID NO: 8880 - RNA, 25 nt, synthetic construct
  source 1..25: mol_type = other RNA
tgtgttcattgccctgggaaggtgg

SEQ ID NO: 8881 - RNA, 25 nt, synthetic construct
  source 1..25: mol_type = other RNA
tgtgttcattgccctgggacggtgg

SEQ ID NO: 8882 - RNA, 25 nt, synthetic construct
  source 1..25: mol_type = other RNA
tgtgttcattgccctgggcaggtgg

SEQ ID NO: 8883 - RNA, 25 nt, synthetic construct
  source 1..25: mol_type = other RNA
tgtgttcattgccctgggccggtgg

SEQ ID NO: 8884 - RNA, 25 nt, synthetic construct
  source 1..25: mol_type = other RNA
tgtgttcattgccctggggcggtgg

SEQ ID NO: 8885 - RNA, 25 nt, synthetic construct
  source 1..25: mol_type = other RNA
tgtgttcattgccctggggaggtgg

SEQ ID NO: 8886 - RNA, 25 nt, synthetic construct
  source 1..25: mol_type = other RNA
tgtgttcattgccctgggcagatgg

SEQ ID NO: 8887 - RNA, 25 nt, synthetic construct
  source 1..25: mol_type = other RNA
tgtgttcattgccctgggtaggtgg

SEQ ID NO: 8888 - RNA, 25 nt, synthetic construct
  source 1..25: mol_type = other RNA
tgtgttcattgccctgggaagatgg

SEQ ID NO: 8889 - RNA, 25 nt, synthetic construct
  source 1..25: mol_type = other RNA
tgtgttcattgccctggggagatgg

SEQ ID NO: 8890 - RNA, 25 nt, synthetic construct
  source 1..25: mol_type = other RNA
tgtgttcattgccctgggtagatgg

SEQ ID NO: 8891 - RNA, 26 nt, synthetic construct
  source 1..26: mol_type = other RNA
ttgtgttcattgccctgggaagatgg

SEQ ID NO: 8892 - RNA, 26 nt, synthetic construct
  source 1..26: mol_type = other RNA
ttgtgttcattgccctgggacggtgg

SEQ ID NO: 8893 - RNA, 26 nt, synthetic construct
  source 1..26: mol_type = other RNA
ttgtgttcattgccctgggccggtgg

SEQ ID NO: 8894 - RNA, 26 nt, synthetic construct
  source 1..26: mol_type = other RNA
ttgtgttcattgccctgggcagatgg

SEQ ID NO: 8895 - RNA, 26 nt, synthetic construct
  source 1..26: mol_type = other RNA
ttgtgttcattgccctggggcggtgg

SEQ ID NO: 8896 - RNA, 26 nt, synthetic construct
  source 1..26: mol_type = other RNA
ttgtgttcattgccctgggtaggtgg

SEQ ID NO: 8897 - RNA, 26 nt, synthetic construct
  source 1..26: mol_type = other RNA
ttgtgttcattgccctgggtagatgg

SEQ ID NO: 8898 - RNA, 26 nt, synthetic construct
  source 1..26: mol_type = other RNA
ttgtgttcattgccctggggagatgg

SEQ ID NO: 8899 - RNA, 26 nt, synthetic construct
  source 1..26: mol_type = other RNA
ttgtgttcattgccctggggaggtgg

SEQ ID NO: 8900 - RNA, 26 nt, synthetic construct
  source 1..26: mol_type = other RNA
ttgtgttcattgccctgggcaggtgg

SEQ ID NO: 8901 - RNA, 26 nt, synthetic construct
  source 1..26: mol_type = other RNA
ttgtgttcattgccctgggtcggtgg

SEQ ID NO: 8902 - RNA, 26 nt, synthetic construct
  source 1..26: mol_type = other RNA
ttgtgttcattgccctgggaaggtgg

SEQ ID NO: 8903 - RNA, 27 nt, synthetic construct
  source 1..27: mol_type = other RNA
tttgtgttcattgccctgggtaggtgg

SEQ ID NO: 8904 - RNA, 27 nt, synthetic construct
  source 1..27: mol_type = other RNA
tttgtgttcattgccctgggcagatgg

SEQ ID NO: 8905 - RNA, 27 nt, synthetic construct
  source 1..27: mol_type = other RNA
tttgtgttcattgccctgggaaggtgg

SEQ ID NO: 8906 - RNA, 27 nt, synthetic construct
  source 1..27: mol_type = other RNA
tttgtgttcattgccctggggagatgg

SEQ ID NO: 8907 - RNA, 27 nt, synthetic construct
  source 1..27: mol_type = other RNA
tttgtgttcattgccctgggacggtgg

SEQ ID NO: 8908 - RNA, 27 nt, synthetic construct
  source 1..27: mol_type = other RNA
tttgtgttcattgccctgggaagatgg

SEQ ID NO: 8909 - RNA, 27 nt, synthetic construct
  source 1..27: mol_type = other RNA
tttgtgttcattgccctggggcggtgg

SEQ ID NO: 8910 - RNA, 27 nt, synthetic construct
  source 1..27: mol_type = other RNA
tttgtgttcattgccctgggccggtgg

SEQ ID NO: 8911 - RNA, 27 nt, synthetic construct
  source 1..27: mol_type = other RNA
tttgtgttcattgccctgggtagatgg

SEQ ID NO: 8912 - RNA, 27 nt, synthetic construct
  source 1..27: mol_type = other RNA
tttgtgttcattgccctggggaggtgg

SEQ ID NO: 8913 - RNA, 27 nt, synthetic construct
  source 1..27: mol_type = other RNA
tttgtgttcattgccctgggtcggtgg

SEQ ID NO: 8914 - RNA, 27 nt, synthetic construct
  source 1..27: mol_type = other RNA
tttgtgttcattgccctgggcaggtgg

SEQ ID NO: 8915 - RNA, 28 nt, synthetic construct
  source 1..28: mol_type = other RNA
ctttgtgttcattgccctgggaagatgg

SEQ ID NO: 8916 - RNA, 28 nt, synthetic construct
  source 1..28: mol_type = other RNA
ctttgtgttcattgccctggggaggtgg

SEQ ID NO: 8917 - RNA, 28 nt, synthetic construct
  source 1..28: mol_type = other RNA
ctttgtgttcattgccctgggcaggtgg

SEQ ID NO: 8918 - RNA, 28 nt, synthetic construct
  source 1..28: mol_type = other RNA
ctttgtgttcattgccctgggccggtgg

SEQ ID NO: 8919 - RNA, 28 nt, synthetic construct
  source 1..28: mol_type = other RNA
ctttgtgttcattgccctggggcggtgg

SEQ ID NO: 8920 - RNA, 28 nt, synthetic construct
  source 1..28: mol_type = other RNA
ctttgtgttcattgccctgggtaggtgg

SEQ ID NO: 8921 - RNA, 28 nt, synthetic construct
  source 1..28: mol_type = other RNA
ctttgtgttcattgccctgggcagatgg

SEQ ID NO: 8922 - RNA, 28 nt, synthetic construct
  source 1..28: mol_type = other RNA
ctttgtgttcattgccctggggagatgg

SEQ ID NO: 8923 - RNA, 28 nt, synthetic construct
  source 1..28: mol_type = other RNA
ctttgtgttcattgccctgggtagatgg

SEQ ID NO: 8924 - RNA, 28 nt, synthetic construct
  source 1..28: mol_type = other RNA
ctttgtgttcattgccctgggtcggtgg

SEQ ID NO: 8925 - RNA, 28 nt, synthetic construct
  source 1..28: mol_type = other RNA
ctttgtgttcattgccctgggacggtgg

SEQ ID NO: 8926 - RNA, 28 nt, synthetic construct
  source 1..28: mol_type = other RNA
ctttgtgttcattgccctgggaaggtgg

SEQ ID NO: 8927 - RNA, 29 nt, synthetic construct
  source 1..29: mol_type = other RNA
tctttgtgttcattgccctggggagatgg

SEQ ID NO: 8928 - RNA, 29 nt, synthetic construct
  source 1..29: mol_type = other RNA
tctttgtgttcattgccctgggtagatgg

SEQ ID NO: 8929 - RNA, 29 nt, synthetic construct
  source 1..29: mol_type = other RNA
tctttgtgttcattgccctgggaagatgg

SEQ ID NO: 8930 - RNA, 29 nt, synthetic construct
  source 1..29: mol_type = other RNA
tctttgtgttcattgccctgggcagatgg

SEQ ID NO: 8931 - RNA, 29 nt, synthetic construct
  source 1..29: mol_type = other RNA
tctttgtgttcattgccctggggcggtgg

SEQ ID NO: 8932 - RNA, 29 nt, synthetic construct
  source 1..29: mol_type = other RNA
tctttgtgttcattgccctgggacggtgg

SEQ ID NO: 8933 - RNA, 29 nt, synthetic construct
  source 1..29: mol_type = other RNA
tctttgtgttcattgccctgggaaggtgg

SEQ ID NO: 8934 - RNA, 29 nt, synthetic construct
  source 1..29: mol_type = other RNA
tctttgtgttcattgccctgggtaggtgg

SEQ ID NO: 8935 - RNA, 29 nt, synthetic construct
  source 1..29: mol_type = other RNA
tctttgtgttcattgccctgggccggtgg

SEQ ID NO: 8936 - RNA, 29 nt, synthetic construct
  source 1..29: mol_type = other RNA
tctttgtgttcattgccctggggaggtgg

SEQ ID NO: 8937 - RNA, 29 nt, synthetic construct
  source 1..29: mol_type = other RNA
tctttgtgttcattgccctgggcaggtgg

SEQ ID NO: 8938 - RNA, 29 nt, synthetic construct
  source 1..29: mol_type = other RNA
tctttgtgttcattgccctgggtcggtgg

SEQ ID NO: 8939 - RNA, 30 nt, synthetic construct
  source 1..30: mol_type = other RNA
ctctttgtgttcattgccctggggcggtgg

SEQ ID NO: 8940 - RNA, 30 nt, synthetic construct
  source 1..30: mol_type = other RNA
ctctttgtgttcattgccctgggaaggtgg

SEQ ID NO: 8941 - RNA, 30 nt, synthetic construct
  source 1..30: mol_type = other RNA
ctctttgtgttcattgccctgggtcggtgg

SEQ ID NO: 8942 - RNA, 30 nt, synthetic construct
  source 1..30: mol_type = other RNA
ctctttgtgttcattgccctgggtagatgg

SEQ ID NO: 8943 - RNA, 30 nt, synthetic construct
  source 1..30: mol_type = other RNA
ctctttgtgttcattgccctgggcagatgg

SEQ ID NO: 8944 - RNA, 30 nt, synthetic construct
  source 1..30: mol_type = other RNA
ctctttgtgttcattgccctgggcaggtgg

SEQ ID NO: 8945 - RNA, 30 nt, synthetic construct
  source 1..30: mol_type = other RNA
ctctttgtgttcattgccctggggagatgg

SEQ ID NO: 8946 - RNA, 30 nt, synthetic construct
  source 1..30: mol_type = other RNA
ctctttgtgttcattgccctgggccggtgg

SEQ ID NO: 8947 - RNA, 30 nt, synthetic construct
  source 1..30: mol_type = other RNA
ctctttgtgttcattgccctggggaggtgg

SEQ ID NO: 8948 - RNA, 30 nt, synthetic construct
  source 1..30: mol_type = other RNA
ctctttgtgttcattgccctgggaagatgg

SEQ ID NO: 8949 - RNA, 30 nt, synthetic construct
  source 1..30: mol_type = other RNA
ctctttgtgttcattgccctgggtaggtgg

SEQ ID NO: 8950 - RNA, 30 nt, synthetic construct
  source 1..30: mol_type = other RNA
ctctttgtgttcattgccctgggacggtgg

SEQ ID NO: 8951 - RNA, 31 nt, synthetic construct
  source 1..31: mol_type = other RNA
gctctttgtgttcattgccctgggcaggtgg

SEQ ID NO: 8952 - RNA, 31 nt, synthetic construct
  source 1..31: mol_type = other RNA
gctctttgtgttcattgccctggggaggtgg

SEQ ID NO: 8953 - RNA, 31 nt, synthetic construct
  source 1..31: mol_type = other RNA
gctctttgtgttcattgccctggggcggtgg

SEQ ID NO: 8954 - RNA, 31 nt, synthetic construct
  source 1..31: mol_type = other RNA
gctctttgtgttcattgccctgggacggtgg

SEQ ID NO: 8955 - RNA, 31 nt, synthetic construct
  source 1..31: mol_type = other RNA
gctctttgtgttcattgccctgggtagatgg

SEQ ID NO: 8956 - RNA, 31 nt, synthetic construct
  source 1..31: mol_type = other RNA
gctctttgtgttcattgccctgggtaggtgg

SEQ ID NO: 8957 - RNA, 31 nt, synthetic construct
  source 1..31: mol_type = other RNA
gctctttgtgttcattgccctgggaagatgg

SEQ ID NO: 8958 - RNA, 31 nt, synthetic construct
  source 1..31: mol_type = other RNA
gctctttgtgttcattgccctgggccggtgg

SEQ ID NO: 8959 - RNA, 31 nt, synthetic construct
  source 1..31: mol_type = other RNA
gctctttgtgttcattgccctggggagatgg

SEQ ID NO: 8960 - RNA, 31 nt, synthetic construct
  source 1..31: mol_type = other RNA
gctctttgtgttcattgccctgggaaggtgg

SEQ ID NO: 8961 - RNA, 31 nt, synthetic construct
  source 1..31: mol_type = other RNA
gctctttgtgttcattgccctgggtcggtgg

SEQ ID NO: 8962 - RNA, 31 nt, synthetic construct
  source 1..31: mol_type = other RNA
gctctttgtgttcattgccctgggcagatgg

SEQ ID NO: 8963 - RNA, 32 nt, synthetic construct
  source 1..32: mol_type = other RNA
tgctctttgtgttcattgccctgggacggtgg

SEQ ID NO: 8964 - RNA, 32 nt, synthetic construct
  source 1..32: mol_type = other RNA
tgctctttgtgttcattgccctgggccggtgg

SEQ ID NO: 8965 - RNA, 32 nt, synthetic construct
  source 1..32: mol_type = other RNA
tgctctttgtgttcattgccctggggcggtgg

SEQ ID NO: 8966 - RNA, 32 nt, synthetic construct
  source 1..32: mol_type = other RNA
tgctctttgtgttcattgccctgggcaggtgg

SEQ ID NO: 8967 - RNA, 32 nt, synthetic construct
  source 1..32: mol_type = other RNA
tgctctttgtgttcattgccctggggagatgg

SEQ ID NO: 8968 - RNA, 32 nt, synthetic construct
  source 1..32: mol_type = other RNA
tgctctttgtgttcattgccctgggaaggtgg

SEQ ID NO: 8969 - RNA, 32 nt, synthetic construct
  source 1..32: mol_type = other RNA
tgctctttgtgttcattgccctgggtcggtgg

SEQ ID NO: 8970 - RNA, 32 nt, synthetic construct
  source 1..32: mol_type = other RNA
tgctctttgtgttcattgccctgggtaggtgg

SEQ ID NO: 8971 - RNA, 32 nt, synthetic construct
  source 1..32: mol_type = other RNA
tgctctttgtgttcattgccctgggcagatgg

SEQ ID NO: 8972 - RNA, 32 nt, synthetic construct
  source 1..32: mol_type = other RNA
tgctctttgtgttcattgccctgggtagatgg

SEQ ID NO: 8973 - RNA, 32 nt, synthetic construct
  source 1..32: mol_type = other RNA
tgctctttgtgttcattgccctgggaagatgg

SEQ ID NO: 8974 - RNA, 32 nt, synthetic construct
  source 1..32: mol_type = other RNA
tgctctttgtgttcattgccctggggaggtgg

SEQ ID NO: 8975 - RNA, 33 nt, synthetic construct
  source 1..33: mol_type = other RNA
atgctctttgtgttcattgccctgggaagatgg

SEQ ID NO: 8976 - RNA, 33 nt, synthetic construct
  source 1..33: mol_type = other RNA
atgctctttgtgttcattgccctgggcagatgg

SEQ ID NO: 8977 - RNA, 33 nt, synthetic construct
  source 1..33: mol_type = other RNA
atgctctttgtgttcattgccctggggcggtgg

SEQ ID NO: 8978 - RNA, 33 nt, synthetic construct
  source 1..33: mol_type = other RNA
atgctctttgtgttcattgccctgggtagatgg

SEQ ID NO: 8979 - RNA, 33 nt, synthetic construct
  source 1..33: mol_type = other RNA
atgctctttgtgttcattgccctgggccggtgg

SEQ ID NO: 8980 - RNA, 33 nt, synthetic construct
  source 1..33: mol_type = other RNA
atgctctttgtgttcattgccctgggaaggtgg

SEQ ID NO: 8981 - RNA, 33 nt, synthetic construct
  source 1..33: mol_type = other RNA
atgctctttgtgttcattgccctggggagatgg

SEQ ID NO: 8982 - RNA, 33 nt, synthetic construct
  source 1..33: mol_type = other RNA
atgctctttgtgttcattgccctgggacggtgg

SEQ ID NO: 8983 - RNA, 33 nt, synthetic construct
  source 1..33: mol_type = other RNA
atgctctttgtgttcattgccctgggtcggtgg

SEQ ID NO: 8984 - RNA, 33 nt, synthetic construct
  source 1..33: mol_type = other RNA
atgctctttgtgttcattgccctggggaggtgg

SEQ ID NO: 8985 - RNA, 33 nt, synthetic construct
  source 1..33: mol_type = other RNA
atgctctttgtgttcattgccctgggcaggtgg

SEQ ID NO: 8986 - RNA, 33 nt, synthetic construct
  source 1..33: mol_type = other RNA
atgctctttgtgttcattgccctgggtaggtgg

SEQ ID NO: 8987 - RNA, 34 nt, synthetic construct
  source 1..34: mol_type = other RNA
catgctctttgtgttcattgccctgggacggtgg

SEQ ID NO: 8988 - RNA, 34 nt, synthetic construct
  source 1..34: mol_type = other RNA
catgctctttgtgttcattgccctgggtagatgg

SEQ ID NO: 8989 - RNA, 34 nt, synthetic construct
  source 1..34: mol_type = other RNA
catgctctttgtgttcattgccctggggaggtgg

SEQ ID NO: 8990 - RNA, 34 nt, synthetic construct
  source 1..34: mol_type = other RNA
catgctctttgtgttcattgccctgggcaggtgg

SEQ ID NO: 8991 - RNA, 34 nt, synthetic construct
  source 1..34: mol_type = other RNA
catgctctttgtgttcattgccctggggcggtgg

SEQ ID NO: 8992 - RNA, 34 nt, synthetic construct
  source 1..34: mol_type = other RNA
catgctctttgtgttcattgccctgggcagatgg

SEQ ID NO: 8993 - RNA, 34 nt, synthetic construct
  source 1..34: mol_type = other RNA
catgctctttgtgttcattgccctgggccggtgg

SEQ ID NO: 8994 - RNA, 34 nt, synthetic construct
  source 1..34: mol_type = other RNA
catgctctttgtgttcattgccctgggtaggtgg

SEQ ID NO: 8995 - RNA, 34 nt, synthetic construct
  source 1..34: mol_type = other RNA
catgctctttgtgttcattgccctgggaaggtgg

SEQ ID NO: 8996 - RNA, 34 nt, synthetic construct
  source 1..34: mol_type = other RNA
catgctctttgtgttcattgccctgggaagatgg

SEQ ID NO: 8997 - RNA, 34 nt, synthetic construct
  source 1..34: mol_type = other RNA
catgctctttgtgttcattgccctggggagatgg

SEQ ID NO: 8998 - RNA, 34 nt, synthetic construct
  source 1..34: mol_type = other RNA
catgctctttgtgttcattgccctgggtcggtgg

SEQ ID NO: 8999 - RNA, 35 nt, synthetic construct
  source 1..35: mol_type = other RNA
ccatgctctttgtgttcattgccctggggaggtgg

SEQ ID NO: 9000 - RNA, 35 nt, synthetic construct
  source 1..35: mol_type = other RNA
ccatgctctttgtgttcattgccctgggtcggtgg

SEQ ID NO: 9001 - RNA, 35 nt, synthetic construct
  source 1..35: mol_type = other RNA
ccatgctctttgtgttcattgccctgggacggtgg

SEQ ID NO: 9002 - RNA, 35 nt, synthetic construct
  source 1..35: mol_type = other RNA
ccatgctctttgtgttcattgccctgggtaggtgg

SEQ ID NO: 9003 - RNA, 35 nt, synthetic construct
  source 1..35: mol_type = other RNA
ccatgctctttgtgttcattgccctgggaaggtgg

SEQ ID NO: 9004 - RNA, 35 nt, synthetic construct
  source 1..35: mol_type = other RNA
ccatgctctttgtgttcattgccctgggcagatgg

SEQ ID NO: 9005 - RNA, 35 nt, synthetic construct
  source 1..35: mol_type = other RNA
ccatgctctttgtgttcattgccctggggcggtgg

SEQ ID NO: 9006 - RNA, 35 nt, synthetic construct
  source 1..35: mol_type = other RNA
ccatgctctttgtgttcattgccctgggaagatgg

SEQ ID NO: 9007 - RNA, 35 nt, synthetic construct
  source 1..35: mol_type = other RNA
ccatgctctttgtgttcattgccctgggccggtgg

SEQ ID NO: 9008 - RNA, 35 nt, synthetic construct
  source 1..35: mol_type = other RNA
ccatgctctttgtgttcattgccctgggtagatgg

SEQ ID NO: 9009 - RNA, 35 nt, synthetic construct
  source 1..35: mol_type = other RNA
ccatgctctttgtgttcattgccctggggagatgg

SEQ ID NO: 9010 - RNA, 35 nt, synthetic construct
  source 1..35: mol_type = other RNA
ccatgctctttgtgttcattgccctgggcaggtgg

SEQ ID NO: 9011 - RNA, 36 nt, synthetic construct
  source 1..36: mol_type = other RNA
cccatgctctttgtgttcattgccctggggagatgg

SEQ ID NO: 9012 - RNA, 36 nt, synthetic construct
  source 1..36: mol_type = other RNA
cccatgctctttgtgttcattgccctgggtaggtgg

SEQ ID NO: 9013 - RNA, 36 nt, synthetic construct
  source 1..36: mol_type = other RNA
cccatgctctttgtgttcattgccctgggcagatgg

SEQ ID NO: 9014 - RNA, 36 nt, synthetic construct
  source 1..36: mol_type = other RNA
cccatgctctttgtgttcattgccctgggaaggtgg

SEQ ID NO: 9015 - RNA, 36 nt, synthetic construct
  source 1..36: mol_type = other RNA
cccatgctctttgtgttcattgccctgggccggtgg

SEQ ID NO: 9016 - RNA, 36 nt, synthetic construct
  source 1..36: mol_type = other RNA
cccatgctctttgtgttcattgccctgggacggtgg

SEQ ID NO: 9017 - RNA, 36 nt, synthetic construct
  source 1..36: mol_type = other RNA
cccatgctctttgtgttcattgccctgggtagatgg

SEQ ID NO: 9018 - RNA, 36 nt, synthetic construct
  source 1..36: mol_type = other RNA
cccatgctctttgtgttcattgccctgggtcggtgg

SEQ ID NO: 9019 - RNA, 36 nt, synthetic construct
  source 1..36: mol_type = other RNA
cccatgctctttgtgttcattgccctgggaagatgg

SEQ ID NO: 9020 - RNA, 36 nt, synthetic construct
  source 1..36: mol_type = other RNA
cccatgctctttgtgttcattgccctggggcggtgg

SEQ ID NO: 9021 - RNA, 36 nt, synthetic construct
  source 1..36: mol_type = other RNA
cccatgctctttgtgttcattgccctggggaggtgg

SEQ ID NO: 9022 - RNA, 36 nt, synthetic construct
  source 1..36: mol_type = other RNA
cccatgctctttgtgttcattgccctgggcaggtgg

SEQ ID NO: 9023 - RNA, 37 nt, synthetic construct
  source 1..37: mol_type = other RNA
ccccatgctctttgtgttcattgccctggggcggtgg

SEQ ID NO: 9024 - RNA, 37 nt, synthetic construct
  source 1..37: mol_type = other RNA
ccccatgctctttgtgttcattgccctgggcagatgg

SEQ ID NO: 9025 - RNA, 37 nt, synthetic construct
  source 1..37: mol_type = other RNA
ccccatgctctttgtgttcattgccctgggaagatgg

SEQ ID NO: 9026 - RNA, 37 nt, synthetic construct
  source 1..37: mol_type = other RNA
ccccatgctctttgtgttcattgccctgggtagatgg

SEQ ID NO: 9027 - RNA, 37 nt, synthetic construct
  source 1..37: mol_type = other RNA
ccccatgctctttgtgttcattgccctgggcaggtgg

SEQ ID NO: 9028 - RNA, 37 nt, synthetic construct
  source 1..37: mol_type = other RNA
ccccatgctctttgtgttcattgccctgggacggtgg

SEQ ID NO: 9029 - RNA, 37 nt, synthetic construct
  source 1..37: mol_type = other RNA
ccccatgctctttgtgttcattgccctgggtaggtgg

SEQ ID NO: 9030 - RNA, 37 nt, synthetic construct
  source 1..37: mol_type = other RNA
ccccatgctctttgtgttcattgccctggggagatgg

SEQ ID NO: 9031 - RNA, 37 nt, synthetic construct
  source 1..37: mol_type = other RNA
ccccatgctctttgtgttcattgccctgggaaggtgg

SEQ ID NO: 9032 - RNA, 37 nt, synthetic construct
  source 1..37: mol_type = other RNA
ccccatgctctttgtgttcattgccctggggaggtgg

SEQ ID NO: 9033 - RNA, 37 nt, synthetic construct
  source 1..37: mol_type = other RNA
ccccatgctctttgtgttcattgccctgggccggtgg

SEQ ID NO: 9034 - RNA, 37 nt, synthetic construct
  source 1..37: mol_type = other RNA
ccccatgctctttgtgttcattgccctgggtcggtgg

SEQ ID NO: 9035 - RNA, 38 nt, synthetic construct
  source 1..38: mol_type = other RNA
cccccatgctctttgtgttcattgccctggggcggtgg

SEQ ID NO: 9036 - RNA, 38 nt, synthetic construct
  source 1..38: mol_type = other RNA
cccccatgctctttgtgttcattgccctgggaagatgg

SEQ ID NO: 9037 - RNA, 38 nt, synthetic construct
  source 1..38: mol_type = other RNA
cccccatgctctttgtgttcattgccctgggcagatgg

SEQ ID NO: 9038 - RNA, 38 nt, synthetic construct
  source 1..38: mol_type = other RNA
cccccatgctctttgtgttcattgccctgggacggtgg

SEQ ID NO: 9039 - RNA, 38 nt, synthetic construct
  source 1..38: mol_type = other RNA
cccccatgctctttgtgttcattgccctgggcaggtgg

SEQ ID NO: 9040 - RNA, 38 nt, synthetic construct
  source 1..38: mol_type = other RNA
cccccatgctctttgtgttcattgccctgggaaggtgg

SEQ ID NO: 9041 - RNA, 38 nt, synthetic construct
  source 1..38: mol_type = other RNA
cccccatgctctttgtgttcattgccctgggtagatgg

SEQ ID NO: 9042 - RNA, 38 nt, synthetic construct
  source 1..38: mol_type = other RNA
cccccatgctctttgtgttcattgccctggggaggtgg

SEQ ID NO: 9043 - RNA, 38 nt, synthetic construct
  source 1..38: mol_type = other RNA
cccccatgctctttgtgttcattgccctggggagatgg

SEQ ID NO: 9044 - RNA, 38 nt, synthetic construct
  source 1..38: mol_type = other RNA
cccccatgctctttgtgttcattgccctgggtcggtgg

SEQ ID NO: 9045 - RNA, 38 nt, synthetic construct
  source 1..38: mol_type = other RNA
cccccatgctctttgtgttcattgccctgggccggtgg

SEQ ID NO: 9046 - RNA, 38 nt, synthetic construct
  source 1..38: mol_type = other RNA
cccccatgctctttgtgttcattgccctgggtaggtgg

SEQ ID NO: 9047 - RNA, 39 nt, synthetic construct
  source 1..39: mol_type = other RNA
ccccccatgctctttgtgttcattgccctgggtagatgg

SEQ ID NO: 9048 - RNA, 39 nt, synthetic construct
  source 1..39: mol_type = other RNA
ccccccatgctctttgtgttcattgccctgggccggtgg

SEQ ID NO: 9049 - RNA, 39 nt, synthetic construct
  source 1..39: mol_type = other RNA
ccccccatgctctttgtgttcattgccctgggtaggtgg

SEQ ID NO: 9050 - RNA, 39 nt, synthetic construct
  source 1..39: mol_type = other RNA
ccccccatgctctttgtgttcattgccctgggaaggtgg

SEQ ID NO: 9051 - RNA, 39 nt, synthetic construct
  source 1..39: mol_type = other RNA
ccccccatgctctttgtgttcattgccctgggcagatgg

SEQ ID NO: 9052 - RNA, 39 nt, synthetic construct
  source 1..39: mol_type = other RNA
ccccccatgctctttgtgttcattgccctgggaagatgg

SEQ ID NO: 9053 - RNA, 39 nt, synthetic construct
  source 1..39: mol_type = other RNA
ccccccatgctctttgtgttcattgccctgggcaggtgg

SEQ ID NO: 9054 - RNA, 39 nt, synthetic construct
  source 1..39: mol_type = other RNA
ccccccatgctctttgtgttcattgccctgggacggtgg

SEQ ID NO: 9055 - RNA, 39 nt, synthetic construct
  source 1..39: mol_type = other RNA
ccccccatgctctttgtgttcattgccctggggaggtgg

SEQ ID NO: 9056 - RNA, 39 nt, synthetic construct
  source 1..39: mol_type = other RNA
ccccccatgctctttgtgttcattgccctggggcggtgg

SEQ ID NO: 9057 - RNA, 39 nt, synthetic construct
  source 1..39: mol_type = other RNA
ccccccatgctctttgtgttcattgccctgggtcggtgg

SEQ ID NO: 9058 - RNA, 39 nt, synthetic construct
  source 1..39: mol_type = other RNA
ccccccatgctctttgtgttcattgccctggggagatgg

SEQ ID NO: 9059 - RNA, 40 nt, synthetic construct
  source 1..40: mol_type = other RNA
gccccccatgctctttgtgttcattgccctgggtagatgg

SEQ ID NO: 9060 - RNA, 40 nt, synthetic construct
  source 1..40: mol_type = other RNA
gccccccatgctctttgtgttcattgccctgggccggtgg

SEQ ID NO: 9061 - RNA, 40 nt, synthetic construct
  source 1..40: mol_type = other RNA
gccccccatgctctttgtgttcattgccctgggtcggtgg

SEQ ID NO: 9062 - RNA, 40 nt, synthetic construct
  source 1..40: mol_type = other RNA
gccccccatgctctttgtgttcattgccctgggcaggtgg

SEQ ID NO: 9063 - RNA, 40 nt, synthetic construct
  source 1..40: mol_type = other RNA
gccccccatgctctttgtgttcattgccctgggacggtgg

SEQ ID NO: 9064 - RNA, 40 nt, synthetic construct
  source 1..40: mol_type = other RNA
gccccccatgctctttgtgttcattgccctgggaaggtgg

SEQ ID NO: 9065 - RNA, 40 nt, synthetic construct
  source 1..40: mol_type = other RNA
gccccccatgctctttgtgttcattgccctggggaggtgg

SEQ ID NO: 9066 - RNA, 40 nt, synthetic construct
  source 1..40: mol_type = other RNA
gccccccatgctctttgtgttcattgccctgggaagatgg

SEQ ID NO: 9067 - RNA, 40 nt, synthetic construct
  source 1..40: mol_type = other RNA
gccccccatgctctttgtgttcattgccctggggagatgg

SEQ ID NO: 9068 - RNA, 40 nt, synthetic construct
  source 1..40: mol_type = other RNA
gccccccatgctctttgtgttcattgccctggggcggtgg

SEQ ID NO: 9069 - RNA, 40 nt, synthetic construct
  source 1..40: mol_type = other RNA
gccccccatgctctttgtgttcattgccctgggtaggtgg

SEQ ID NO: 9070 - RNA, 40 nt, synthetic construct
  source 1..40: mol_type = other RNA
gccccccatgctctttgtgttcattgccctgggcagatgg

SEQ ID NO: 9071 - RNA, 41 nt, synthetic construct
  source 1..41: mol_type = other RNA
cgccccccatgctctttgtgttcattgccctggggcggtgg

SEQ ID NO: 9072 - RNA, 41 nt, synthetic construct
  source 1..41: mol_type = other RNA
cgccccccatgctctttgtgttcattgccctgggcagatgg

SEQ ID NO: 9073 - RNA, 41 nt, synthetic construct
  source 1..41: mol_type = other RNA
cgccccccatgctctttgtgttcattgccctgggccggtgg

SEQ ID NO: 9074 - RNA, 41 nt, synthetic construct
  source 1..41: mol_type = other RNA
cgccccccatgctctttgtgttcattgccctgggtaggtgg

SEQ ID NO: 9075 - RNA, 41 nt, synthetic construct
  source 1..41: mol_type = other RNA
cgccccccatgctctttgtgttcattgccctgggtagatgg

SEQ ID NO: 9076 - RNA, 41 nt, synthetic construct
  source 1..41: mol_type = other RNA
cgccccccatgctctttgtgttcattgccctgggaaggtgg

SEQ ID NO: 9077 - RNA, 41 nt, synthetic construct
  source 1..41: mol_type = other RNA
cgccccccatgctctttgtgttcattgccctgggtcggtgg

SEQ ID NO: 9078 - RNA, 41 nt, synthetic construct
  source 1..41: mol_type = other RNA
cgccccccatgctctttgtgttcattgccctgggcaggtgg

SEQ ID NO: 9079 - RNA, 41 nt, synthetic construct
  source 1..41: mol_type = other RNA
cgccccccatgctctttgtgttcattgccctggggagatgg

SEQ ID NO: 9080 - RNA, 41 nt, synthetic construct
  source 1..41: mol_type = other RNA
cgccccccatgctctttgtgttcattgccctgggacggtgg

SEQ ID NO: 9081 - RNA, 41 nt, synthetic construct
  source 1..41: mol_type = other RNA
cgccccccatgctctttgtgttcattgccctgggaagatgg

SEQ ID NO: 9082 - RNA, 41 nt, synthetic construct
  source 1..41: mol_type = other RNA
cgccccccatgctctttgtgttcattgccctggggaggtgg

SEQ ID NO: 9083 - RNA, 42 nt, synthetic construct
  source 1..42: mol_type = other RNA
acgccccccatgctctttgtgttcattgccctgggtcggtgg

SEQ ID NO: 9084 - RNA, 42 nt, synthetic construct
  source 1..42: mol_type = other RNA
acgccccccatgctctttgtgttcattgccctgggtagatgg

SEQ ID NO: 9085 - RNA, 42 nt, synthetic construct
  source 1..42: mol_type = other RNA
acgccccccatgctctttgtgttcattgccctgggacggtgg

SEQ ID NO: 9086 - RNA, 42 nt, synthetic construct
  source 1..42: mol_type = other RNA
acgccccccatgctctttgtgttcattgccctgggaagatgg

SEQ ID NO: 9087 - RNA, 42 nt, synthetic construct
  source 1..42: mol_type = other RNA
acgccccccatgctctttgtgttcattgccctgggcagatgg

SEQ ID NO: 9088 - RNA, 42 nt, synthetic construct
  source 1..42: mol_type = other RNA
acgccccccatgctctttgtgttcattgccctggggcggtgg

SEQ ID NO: 9089 - RNA, 42 nt, synthetic construct
  source 1..42: mol_type = other RNA
acgccccccatgctctttgtgttcattgccctggggagatgg

SEQ ID NO: 9090 - RNA, 42 nt, synthetic construct
  source 1..42: mol_type = other RNA
acgccccccatgctctttgtgttcattgccctggggaggtgg

SEQ ID NO: 9091 - RNA, 42 nt, synthetic construct
  source 1..42: mol_type = other RNA
acgccccccatgctctttgtgttcattgccctgggaaggtgg

SEQ ID NO: 9092 - RNA, 42 nt, synthetic construct
  source 1..42: mol_type = other RNA
acgccccccatgctctttgtgttcattgccctgggccggtgg

SEQ ID NO: 9093 - RNA, 42 nt, synthetic construct
  source 1..42: mol_type = other RNA
acgccccccatgctctttgtgttcattgccctgggtaggtgg

SEQ ID NO: 9094 - RNA, 42 nt, synthetic construct
  source 1..42: mol_type = other RNA
acgccccccatgctctttgtgttcattgccctgggcaggtgg

SEQ ID NO: 9095 - RNA, 43 nt, synthetic construct
  source 1..43: mol_type = other RNA
cacgccccccatgctctttgtgttcattgccctgggccggtgg

SEQ ID NO: 9096 - RNA, 43 nt, synthetic construct
  source 1..43: mol_type = other RNA
cacgccccccatgctctttgtgttcattgccctgggcagatgg

SEQ ID NO: 9097 - RNA, 43 nt, synthetic construct
  source 1..43: mol_type = other RNA
cacgccccccatgctctttgtgttcattgccctgggcaggtgg

SEQ ID NO: 9098 - RNA, 43 nt, synthetic construct
  source 1..43: mol_type = other RNA
cacgccccccatgctctttgtgttcattgccctgggtaggtgg

SEQ ID NO: 9099 - RNA, 43 nt, synthetic construct
  source 1..43: mol_type = other RNA
cacgccccccatgctctttgtgttcattgccctgggtagatgg

SEQ ID NO: 9100 - RNA, 43 nt, synthetic construct
  source 1..43: mol_type = other RNA
cacgccccccatgctctttgtgttcattgccctgggaagatgg

SEQ ID NO: 9101 - RNA, 43 nt, synthetic construct
  source 1..43: mol_type = other RNA
cacgccccccatgctctttgtgttcattgccctgggaaggtgg

SEQ ID NO: 9102 - RNA, 43 nt, synthetic construct
  source 1..43: mol_type = other RNA
cacgccccccatgctctttgtgttcattgccctgggacggtgg

SEQ ID NO: 9103 - RNA, 43 nt, synthetic construct
  source 1..43: mol_type = other RNA
cacgccccccatgctctttgtgttcattgccctggggcggtgg

SEQ ID NO: 9104 - RNA, 43 nt, synthetic construct
  source 1..43: mol_type = other RNA
cacgccccccatgctctttgtgttcattgccctggggaggtgg

SEQ ID NO: 9105 - RNA, 43 nt, synthetic construct
  source 1..43: mol_type = other RNA
cacgccccccatgctctttgtgttcattgccctggggagatgg

SEQ ID NO: 9106 - RNA, 43 nt, synthetic construct
  source 1..43: mol_type = other RNA
cacgccccccatgctctttgtgttcattgccctgggtcggtgg

SEQ ID NO: 9107 - RNA, 44 nt, synthetic construct
  source 1..44: mol_type = other RNA
acacgccccccatgctctttgtgttcattgccctgggcaggtgg

SEQ ID NO: 9108 - RNA, 44 nt, synthetic construct
  source 1..44: mol_type = other RNA
acacgccccccatgctctttgtgttcattgccctgggccggtgg

SEQ ID NO: 9109 - RNA, 44 nt, synthetic construct
  source 1..44: mol_type = other RNA
acacgccccccatgctctttgtgttcattgccctgggcagatgg

SEQ ID NO: 9110 - RNA, 44 nt, synthetic construct
  source 1..44: mol_type = other RNA
acacgccccccatgctctttgtgttcattgccctggggaggtgg

SEQ ID NO: 9111 - RNA, 44 nt, synthetic construct
  source 1..44: mol_type = other RNA
acacgccccccatgctctttgtgttcattgccctgggaagatgg

SEQ ID NO: 9112 - RNA, 44 nt, synthetic construct
  source 1..44: mol_type = other RNA
acacgccccccatgctctttgtgttcattgccctgggacggtgg

SEQ ID NO: 9113 - RNA, 44 nt, synthetic construct
  source 1..44: mol_type = other RNA
acacgccccccatgctctttgtgttcattgccctggggagatgg

SEQ ID NO: 9114 - RNA, 44 nt, synthetic construct
  source 1..44: mol_type = other RNA
acacgccccccatgctctttgtgttcattgccctgggaaggtgg

SEQ ID NO: 9115 - RNA, 44 nt, synthetic construct
  source 1..44: mol_type = other RNA
acacgccccccatgctctttgtgttcattgccctgggtagatgg

SEQ ID NO: 9116 - RNA, 44 nt, synthetic construct
  source 1..44: mol_type = other RNA
acacgccccccatgctctttgtgttcattgccctgggtcggtgg

SEQ ID NO: 9117 - RNA, 44 nt, synthetic construct
  source 1..44: mol_type = other RNA
acacgccccccatgctctttgtgttcattgccctggggcggtgg

SEQ ID NO: 9118 - RNA, 44 nt, synthetic construct
  source 1..44: mol_type = other RNA
acacgccccccatgctctttgtgttcattgccctgggtaggtgg

SEQ ID NO: 9119 - RNA, 45 nt, synthetic construct
  source 1..45: mol_type = other RNA
gacacgccccccatgctctttgtgttcattgccctgggacggtgg

SEQ ID NO: 9120 - RNA, 45 nt, synthetic construct
  source 1..45: mol_type = other RNA
gacacgccccccatgctctttgtgttcattgccctggggagatgg

SEQ ID NO: 9121 - RNA, 45 nt, synthetic construct
  source 1..45: mol_type = other RNA
gacacgccccccatgctctttgtgttcattgccctggggaggtgg

SEQ ID NO: 9122 - RNA, 45 nt, synthetic construct
  source 1..45: mol_type = other RNA
gacacgccccccatgctctttgtgttcattgccctgggcaggtgg

SEQ ID NO: 9123 - RNA, 45 nt, synthetic construct
  source 1..45: mol_type = other RNA
gacacgccccccatgctctttgtgttcattgccctgggaaggtgg

SEQ ID NO: 9124 - RNA, 45 nt, synthetic construct
  source 1..45: mol_type = other RNA
gacacgccccccatgctctttgtgttcattgccctgggccggtgg

SEQ ID NO: 9125 - RNA, 45 nt, synthetic construct
  source 1..45: mol_type = other RNA
gacacgccccccatgctctttgtgttcattgccctgggtcggtgg

SEQ ID NO: 9126 - RNA, 45 nt, synthetic construct
  source 1..45: mol_type = other RNA
gacacgccccccatgctctttgtgttcattgccctgggaagatgg

SEQ ID NO: 9127 - RNA, 45 nt, synthetic construct
  source 1..45: mol_type = other RNA
gacacgccccccatgctctttgtgttcattgccctggggcggtgg

SEQ ID NO: 9128 - RNA, 45 nt, synthetic construct
  source 1..45: mol_type = other RNA
gacacgccccccatgctctttgtgttcattgccctgggtagatgg

SEQ ID NO: 9129 - RNA, 45 nt, synthetic construct
  source 1..45: mol_type = other RNA
gacacgccccccatgctctttgtgttcattgccctgggtaggtgg

SEQ ID NO: 9130 - RNA, 45 nt, synthetic construct
  source 1..45: mol_type = other RNA
gacacgccccccatgctctttgtgttcattgccctgggcagatgg

SEQ ID NO: 9131 - RNA, 46 nt, synthetic construct
  source 1..46: mol_type = other RNA
cgacacgccccccatgctctttgtgttcattgccctgggcaggtgg

SEQ ID NO: 9132 - RNA, 46 nt, synthetic construct
  source 1..46: mol_type = other RNA
cgacacgccccccatgctctttgtgttcattgccctgggtagatgg

SEQ ID NO: 9133 - RNA, 46 nt, synthetic construct
  source 1..46: mol_type = other RNA
cgacacgccccccatgctctttgtgttcattgccctgggaagatgg

SEQ ID NO: 9134 - RNA, 46 nt, synthetic construct
  source 1..46: mol_type = other RNA
cgacacgccccccatgctctttgtgttcattgccctgggacggtgg

SEQ ID NO: 9135 - RNA, 46 nt, synthetic construct
  source 1..46: mol_type = other RNA
cgacacgccccccatgctctttgtgttcattgccctggggagatgg

SEQ ID NO: 9136 - RNA, 46 nt, synthetic construct
  source 1..46: mol_type = other RNA
cgacacgccccccatgctctttgtgttcattgccctgggccggtgg

SEQ ID NO: 9137 - RNA, 46 nt, synthetic construct
  source 1..46: mol_type = other RNA
cgacacgccccccatgctctttgtgttcattgccctggggcggtgg

SEQ ID NO: 9138 - RNA, 46 nt, synthetic construct
  source 1..46: mol_type = other RNA
cgacacgccccccatgctctttgtgttcattgccctgggaaggtgg

SEQ ID NO: 9139 - RNA, 46 nt, synthetic construct
  source 1..46: mol_type = other RNA
cgacacgccccccatgctctttgtgttcattgccctgggcagatgg

SEQ ID NO: 9140 - RNA, 46 nt, synthetic construct
  source 1..46: mol_type = other RNA
cgacacgccccccatgctctttgtgttcattgccctggggaggtgg

SEQ ID NO: 9141 - RNA, 46 nt, synthetic construct
  source 1..46: mol_type = other RNA
cgacacgccccccatgctctttgtgttcattgccctgggtaggtgg

SEQ ID NO: 9142 - RNA, 46 nt, synthetic construct
  source 1..46: mol_type = other RNA
cgacacgccccccatgctctttgtgttcattgccctgggtcggtgg

SEQ ID NO: 9143 - RNA, 47 nt, synthetic construct
  source 1..47: mol_type = other RNA
tcgacacgccccccatgctctttgtgttcattgccctgggcaggtgg

SEQ ID NO: 9144 - RNA, 47 nt, synthetic construct
  source 1..47: mol_type = other RNA
tcgacacgccccccatgctctttgtgttcattgccctgggccggtgg

SEQ ID NO: 9145 - RNA, 47 nt, synthetic construct
  source 1..47: mol_type = other RNA
tcgacacgccccccatgctctttgtgttcattgccctgggaagatgg

SEQ ID NO: 9146 - RNA, 47 nt, synthetic construct
  source 1..47: mol_type = other RNA
tcgacacgccccccatgctctttgtgttcattgccctgggtagatgg

SEQ ID NO: 9147 - RNA, 47 nt, synthetic construct
  source 1..47: mol_type = other RNA
tcgacacgccccccatgctctttgtgttcattgccctgggtaggtgg

SEQ ID NO: 9148 - RNA, 47 nt, synthetic construct
  source 1..47: mol_type = other RNA
tcgacacgccccccatgctctttgtgttcattgccctggggaggtgg

SEQ ID NO: 9149 - RNA, 47 nt, synthetic construct
  source 1..47: mol_type = other RNA
tcgacacgccccccatgctctttgtgttcattgccctgggaaggtgg

SEQ ID NO: 9150 - RNA, 47 nt, synthetic construct
  source 1..47: mol_type = other RNA
tcgacacgccccccatgctctttgtgttcattgccctggggagatgg

SEQ ID NO: 9151 - RNA, 47 nt, synthetic construct
  source 1..47: mol_type = other RNA
tcgacacgccccccatgctctttgtgttcattgccctgggtcggtgg

SEQ ID NO: 9152 - RNA, 47 nt, synthetic construct
  source 1..47: mol_type = other RNA
tcgacacgccccccatgctctttgtgttcattgccctgggacggtgg

SEQ ID NO: 9153 - RNA, 47 nt, synthetic construct
  source 1..47: mol_type = other RNA
tcgacacgccccccatgctctttgtgttcattgccctggggcggtgg

SEQ ID NO: 9154 - RNA, 47 nt, synthetic construct
  source 1..47: mol_type = other RNA
tcgacacgccccccatgctctttgtgttcattgccctgggcagatgg

SEQ ID NO: 9155 - RNA, 48 nt, synthetic construct
  source 1..48: mol_type = other RNA
ttcgacacgccccccatgctctttgtgttcattgccctgggtaggtgg

SEQ ID NO: 9156 - RNA, 48 nt, synthetic construct
  source 1..48: mol_type = other RNA
ttcgacacgccccccatgctctttgtgttcattgccctgggaaggtgg

SEQ ID NO: 9157 - RNA, 48 nt, synthetic construct
  source 1..48: mol_type = other RNA
ttcgacacgccccccatgctctttgtgttcattgccctggggaggtgg

SEQ ID NO: 9158 - RNA, 48 nt, synthetic construct
  source 1..48: mol_type = other RNA
ttcgacacgccccccatgctctttgtgttcattgccctgggacggtgg

SEQ ID NO: 9159 - RNA, 48 nt, synthetic construct
  source 1..48: mol_type = other RNA
ttcgacacgccccccatgctctttgtgttcattgccctggggagatgg

SEQ ID NO: 9160 - RNA, 48 nt, synthetic construct
  source 1..48: mol_type = other RNA
ttcgacacgccccccatgctctttgtgttcattgccctgggtcggtgg

SEQ ID NO: 9161 - RNA, 48 nt, synthetic construct
  source 1..48: mol_type = other RNA
ttcgacacgccccccatgctctttgtgttcattgccctgggaagatgg

SEQ ID NO: 9162 - RNA, 48 nt, synthetic construct
  source 1..48: mol_type = other RNA
ttcgacacgccccccatgctctttgtgttcattgccctgggtagatgg

SEQ ID NO: 9163 - RNA, 48 nt, synthetic construct
  source 1..48: mol_type = other RNA
ttcgacacgccccccatgctctttgtgttcattgccctgggccggtgg

SEQ ID NO: 9164 - RNA, 48 nt, synthetic construct
  source 1..48: mol_type = other RNA
ttcgacacgccccccatgctctttgtgttcattgccctgggcaggtgg

SEQ ID NO: 9165 - RNA, 48 nt, synthetic construct
  source 1..48: mol_type = other RNA
ttcgacacgccccccatgctctttgtgttcattgccctgggcagatgg

SEQ ID NO: 9166 - RNA, 48 nt, synthetic construct
  source 1..48: mol_type = other RNA
ttcgacacgccccccatgctctttgtgttcattgccctggggcggtgg

SEQ ID NO: 9167 - RNA, 49 nt, synthetic construct
  source 1..49: mol_type = other RNA
cttcgacacgccccccatgctctttgtgttcattgccctgggaagatgg

SEQ ID NO: 9168 - RNA, 49 nt, synthetic construct
  source 1..49: mol_type = other RNA
cttcgacacgccccccatgctctttgtgttcattgccctggggagatgg

SEQ ID NO: 9169 - RNA, 49 nt, synthetic construct
  source 1..49: mol_type = other RNA
cttcgacacgccccccatgctctttgtgttcattgccctgggtcggtgg

SEQ ID NO: 9170 - RNA, 49 nt, synthetic construct
  source 1..49: mol_type = other RNA
cttcgacacgccccccatgctctttgtgttcattgccctgggcaggtgg

SEQ ID NO: 9171 - RNA, 49 nt, synthetic construct
  source 1..49: mol_type = other RNA
cttcgacacgccccccatgctctttgtgttcattgccctggggcggtgg

SEQ ID NO: 9172 - RNA, 49 nt, synthetic construct
  source 1..49: mol_type = other RNA
cttcgacacgccccccatgctctttgtgttcattgccctgggcagatgg

SEQ ID NO: 9173 - RNA, 49 nt, synthetic construct
  source 1..49: mol_type = other RNA
cttcgacacgccccccatgctctttgtgttcattgccctgggtaggtgg

SEQ ID NO: 9174 - RNA, 49 nt, synthetic construct
  source 1..49: mol_type = other RNA
cttcgacacgccccccatgctctttgtgttcattgccctgggaaggtgg

SEQ ID NO: 9175 - RNA, 49 nt, synthetic construct
  source 1..49: mol_type = other RNA
cttcgacacgccccccatgctctttgtgttcattgccctgggtagatgg

SEQ ID NO: 9176 - RNA, 49 nt, synthetic construct
  source 1..49: mol_type = other RNA
cttcgacacgccccccatgctctttgtgttcattgccctggggaggtgg

SEQ ID NO: 9177 - RNA, 49 nt, synthetic construct
  source 1..49: mol_type = other RNA
cttcgacacgccccccatgctctttgtgttcattgccctgggccggtgg

SEQ ID NO: 9178 - RNA, 49 nt, synthetic construct
  source 1..49: mol_type = other RNA
cttcgacacgccccccatgctctttgtgttcattgccctgggacggtgg

SEQ ID NO: 9179 - RNA, 50 nt, synthetic construct
  source 1..50: mol_type = other RNA
tcttcgacacgccccccatgctctttgtgttcattgccctgggtagatgg

SEQ ID NO: 9180 - RNA, 50 nt, synthetic construct
  source 1..50: mol_type = other RNA
tcttcgacacgccccccatgctctttgtgttcattgccctgggcagatgg

SEQ ID NO: 9181 - RNA, 50 nt, synthetic construct
  source 1..50: mol_type = other RNA
tcttcgacacgccccccatgctctttgtgttcattgccctgggacggtgg

SEQ ID NO: 9182 - RNA, 50 nt, synthetic construct
  source 1..50: mol_type = other RNA
tcttcgacacgccccccatgctctttgtgttcattgccctggggcggtgg

SEQ ID NO: 9183 - RNA, 50 nt, synthetic construct
  source 1..50: mol_type = other RNA
tcttcgacacgccccccatgctctttgtgttcattgccctgggccggtgg

SEQ ID NO: 9184 - RNA, 50 nt, synthetic construct
  source 1..50: mol_type = other RNA
tcttcgacacgccccccatgctctttgtgttcattgccctgggtcggtgg

SEQ ID NO: 9185 - RNA, 50 nt, synthetic construct
  source 1..50: mol_type = other RNA
tcttcgacacgccccccatgctctttgtgttcattgccctgggcaggtgg

SEQ ID NO: 9186 - RNA, 50 nt, synthetic construct
  source 1..50: mol_type = other RNA
tcttcgacacgccccccatgctctttgtgttcattgccctggggagatgg

SEQ ID NO: 9187 - RNA, 50 nt, synthetic construct
  source 1..50: mol_type = other RNA
tcttcgacacgccccccatgctctttgtgttcattgccctgggtaggtgg

SEQ ID NO: 9188 - RNA, 50 nt, synthetic construct
  source 1..50: mol_type = other RNA
tcttcgacacgccccccatgctctttgtgttcattgccctgggaagatgg

SEQ ID NO: 9189 - RNA, 50 nt, synthetic construct
  source 1..50: mol_type = other RNA
tcttcgacacgccccccatgctctttgtgttcattgccctgggaaggtgg

SEQ ID NO: 9190 - RNA, 50 nt, synthetic construct
  source 1..50: mol_type = other RNA
tcttcgacacgccccccatgctctttgtgttcattgccctggggaggtgg

SEQ ID NO: 9191 - RNA, 51 nt, synthetic construct
  source 1..51: mol_type = other RNA
ttcttcgacacgccccccatgctctttgtgttcattgccctgggaaggtgg

SEQ ID NO: 9192 - RNA, 51 nt, synthetic construct
  source 1..51: mol_type = other RNA
ttcttcgacacgccccccatgctctttgtgttcattgccctggggagatgg

SEQ ID NO: 9193 - RNA, 51 nt, synthetic construct
  source 1..51: mol_type = other RNA
ttcttcgacacgccccccatgctctttgtgttcattgccctgggacggtgg

SEQ ID NO: 9194 - RNA, 51 nt, synthetic construct
  source 1..51: mol_type = other RNA
ttcttcgacacgccccccatgctctttgtgttcattgccctgggaagatgg

SEQ ID NO: 9195 - RNA, 51 nt, synthetic construct
  source 1..51: mol_type = other RNA
ttcttcgacacgccccccatgctctttgtgttcattgccctgggtaggtgg

SEQ ID NO: 9196 - RNA, 51 nt, synthetic construct
  source 1..51: mol_type = other RNA
ttcttcgacacgccccccatgctctttgtgttcattgccctggggcggtgg

SEQ ID NO: 9197 - RNA, 51 nt, synthetic construct
  source 1..51: mol_type = other RNA
ttcttcgacacgccccccatgctctttgtgttcattgccctgggtcggtgg

SEQ ID NO: 9198 - RNA, 51 nt, synthetic construct
  source 1..51: mol_type = other RNA
ttcttcgacacgccccccatgctctttgtgttcattgccctgggccggtgg

SEQ ID NO: 9199 - RNA, 51 nt, synthetic construct
  source 1..51: mol_type = other RNA
ttcttcgacacgccccccatgctctttgtgttcattgccctgggtagatgg

SEQ ID NO: 9200 - RNA, 51 nt, synthetic construct
  source 1..51: mol_type = other RNA
ttcttcgacacgccccccatgctctttgtgttcattgccctgggcagatgg

SEQ ID NO: 9201 - RNA, 51 nt, synthetic construct
  source 1..51: mol_type = other RNA
ttcttcgacacgccccccatgctctttgtgttcattgccctgggcaggtgg

SEQ ID NO: 9202 - RNA, 51 nt, synthetic construct
  source 1..51: mol_type = other RNA
ttcttcgacacgccccccatgctctttgtgttcattgccctggggaggtgg

SEQ ID NO: 9203 - RNA, 52 nt, synthetic construct
  source 1..52: mol_type = other RNA
attcttcgacacgccccccatgctctttgtgttcattgccctgggtcggtgg

SEQ ID NO: 9204 - RNA, 52 nt, synthetic construct
  source 1..52: mol_type = other RNA
attcttcgacacgccccccatgctctttgtgttcattgccctgggaagatgg

SEQ ID NO: 9205 - RNA, 52 nt, synthetic construct
  source 1..52: mol_type = other RNA
attcttcgacacgccccccatgctctttgtgttcattgccctggggcggtgg

SEQ ID NO: 9206 - RNA, 52 nt, synthetic construct
  source 1..52: mol_type = other RNA
attcttcgacacgccccccatgctctttgtgttcattgccctgggcagatgg

SEQ ID NO: 9207 - RNA, 52 nt, synthetic construct
  source 1..52: mol_type = other RNA
attcttcgacacgccccccatgctctttgtgttcattgccctgggccggtgg

SEQ ID NO: 9208 - RNA, 52 nt, synthetic construct
  source 1..52: mol_type = other RNA
attcttcgacacgccccccatgctctttgtgttcattgccctgggtagatgg

SEQ ID NO: 9209 - RNA, 52 nt, synthetic construct
  source 1..52: mol_type = other RNA
attcttcgacacgccccccatgctctttgtgttcattgccctgggaaggtgg

SEQ ID NO: 9210 - RNA, 52 nt, synthetic construct
  source 1..52: mol_type = other RNA
attcttcgacacgccccccatgctctttgtgttcattgccctgggtaggtgg

SEQ ID NO: 9211 - RNA, 52 nt, synthetic construct
  source 1..52: mol_type = other RNA
attcttcgacacgccccccatgctctttgtgttcattgccctggggagatgg

SEQ ID NO: 9212 - RNA, 52 nt, synthetic construct
  source 1..52: mol_type = other RNA
attcttcgacacgccccccatgctctttgtgttcattgccctgggacggtgg

SEQ ID NO: 9213 - RNA, 52 nt, synthetic construct
  source 1..52: mol_type = other RNA
attcttcgacacgccccccatgctctttgtgttcattgccctgggcaggtgg

SEQ ID NO: 9214 - RNA, 52 nt, synthetic construct
  source 1..52: mol_type = other RNA
attcttcgacacgccccccatgctctttgtgttcattgccctggggaggtgg

SEQ ID NO: 9215 - RNA, 53 nt, synthetic construct
  source 1..53: mol_type = other RNA
cattcttcgacacgccccccatgctctttgtgttcattgccctgggaaggtgg

SEQ ID NO: 9216 - RNA, 53 nt, synthetic construct
  source 1..53: mol_type = other RNA
cattcttcgacacgccccccatgctctttgtgttcattgccctggggcggtgg

SEQ ID NO: 9217 - RNA, 53 nt, synthetic construct
  source 1..53: mol_type = other RNA
cattcttcgacacgccccccatgctctttgtgttcattgccctgggaagatgg

SEQ ID NO: 9218 - RNA, 53 nt, synthetic construct
  source 1..53: mol_type = other RNA
cattcttcgacacgccccccatgctctttgtgttcattgccctggggagatgg

SEQ ID NO: 9219 - RNA, 53 nt, synthetic construct
  source 1..53: mol_type = other RNA
cattcttcgacacgccccccatgctctttgtgttcattgccctgggcaggtgg

SEQ ID NO: 9220 - RNA, 53 nt, synthetic construct
  source 1..53: mol_type = other RNA
cattcttcgacacgccccccatgctctttgtgttcattgccctgggtcggtgg

SEQ ID NO: 9221 - RNA, 53 nt, synthetic construct
  source 1..53: mol_type = other RNA
cattcttcgacacgccccccatgctctttgtgttcattgccctgggtaggtgg

SEQ ID NO: 9222 - RNA, 53 nt, synthetic construct
  source 1..53: mol_type = other RNA
cattcttcgacacgccccccatgctctttgtgttcattgccctggggaggtgg

SEQ ID NO: 9223 - RNA, 53 nt, synthetic construct
  source 1..53: mol_type = other RNA
cattcttcgacacgccccccatgctctttgtgttcattgccctgggccggtgg

SEQ ID NO: 9224 - RNA, 53 nt, synthetic construct
  source 1..53: mol_type = other RNA
cattcttcgacacgccccccatgctctttgtgttcattgccctgggcagatgg

SEQ ID NO: 9225 - RNA, 53 nt, synthetic construct
  source 1..53: mol_type = other RNA
cattcttcgacacgccccccatgctctttgtgttcattgccctgggacggtgg

SEQ ID NO: 9226 - RNA, 53 nt, synthetic construct
  source 1..53: mol_type = other RNA
cattcttcgacacgccccccatgctctttgtgttcattgccctgggtagatgg

SEQ ID NO: 9227 - RNA, 54 nt, synthetic construct
  source 1..54: mol_type = other RNA
acattcttcgacacgccccccatgctctttgtgttcattgccctgggaagatgg

SEQ ID NO: 9228 - RNA, 54 nt, synthetic construct
  source 1..54: mol_type = other RNA
acattcttcgacacgccccccatgctctttgtgttcattgccctgggtaggtgg

SEQ ID NO: 9229 - RNA, 54 nt, synthetic construct
  source 1..54: mol_type = other RNA
acattcttcgacacgccccccatgctctttgtgttcattgccctgggacggtgg

SEQ ID NO: 9230 - RNA, 54 nt, synthetic construct
  source 1..54: mol_type = other RNA
acattcttcgacacgccccccatgctctttgtgttcattgccctggggcggtgg

SEQ ID NO: 9231 - RNA, 54 nt, synthetic construct
  source 1..54: mol_type = other RNA
acattcttcgacacgccccccatgctctttgtgttcattgccctgggaaggtgg

SEQ ID NO: 9232 - RNA, 54 nt, synthetic construct
  source 1..54: mol_type = other RNA
acattcttcgacacgccccccatgctctttgtgttcattgccctggggaggtgg

SEQ ID NO: 9233 - RNA, 54 nt, synthetic construct
  source 1..54: mol_type = other RNA
acattcttcgacacgccccccatgctctttgtgttcattgccctgggccggtgg

SEQ ID NO: 9234 - RNA, 54 nt, synthetic construct
  source 1..54: mol_type = other RNA
acattcttcgacacgccccccatgctctttgtgttcattgccctggggagatgg

SEQ ID NO: 9235 - RNA, 54 nt, synthetic construct
  source 1..54: mol_type = other RNA
acattcttcgacacgccccccatgctctttgtgttcattgccctgggcagatgg

SEQ ID NO: 9236 - RNA, 54 nt, synthetic construct
  source 1..54: mol_type = other RNA
acattcttcgacacgccccccatgctctttgtgttcattgccctgggtcggtgg

SEQ ID NO: 9237 - RNA, 54 nt, synthetic construct
  source 1..54: mol_type = other RNA
acattcttcgacacgccccccatgctctttgtgttcattgccctgggtagatgg

SEQ ID NO: 9238 - RNA, 54 nt, synthetic construct
  source 1..54: mol_type = other RNA
acattcttcgacacgccccccatgctctttgtgttcattgccctgggcaggtgg

SEQ ID NO: 9239 - RNA, 55 nt, synthetic construct
  source 1..55: mol_type = other RNA
gacattcttcgacacgccccccatgctctttgtgttcattgccctgggtcggtgg

SEQ ID NO: 9240 - RNA, 55 nt, synthetic construct
  source 1..55: mol_type = other RNA
gacattcttcgacacgccccccatgctctttgtgttcattgccctgggaaggtgg

SEQ ID NO: 9241 - RNA, 55 nt, synthetic construct
  source 1..55: mol_type = other RNA
gacattcttcgacacgccccccatgctctttgtgttcattgccctgggcagatgg

SEQ ID NO: 9242 - RNA, 55 nt, synthetic construct
  source 1..55: mol_type = other RNA
gacattcttcgacacgccccccatgctctttgtgttcattgccctggggcggtgg

SEQ ID NO: 9243 - RNA, 55 nt, synthetic construct
  source 1..55: mol_type = other RNA
gacattcttcgacacgccccccatgctctttgtgttcattgccctgggaagatgg

SEQ ID NO: 9244 - RNA, 55 nt, synthetic construct
  source 1..55: mol_type = other RNA
gacattcttcgacacgccccccatgctctttgtgttcattgccctgggacggtgg

SEQ ID NO: 9245 - RNA, 55 nt, synthetic construct
  source 1..55: mol_type = other RNA
gacattcttcgacacgccccccatgctctttgtgttcattgccctggggaggtgg

SEQ ID NO: 9246 - RNA, 55 nt, synthetic construct
  source 1..55: mol_type = other RNA
gacattcttcgacacgccccccatgctctttgtgttcattgccctgggcaggtgg

SEQ ID NO: 9247 - RNA, 55 nt, synthetic construct
  source 1..55: mol_type = other RNA
gacattcttcgacacgccccccatgctctttgtgttcattgccctgggtaggtgg

SEQ ID NO: 9248 - RNA, 55 nt, synthetic construct
  source 1..55: mol_type = other RNA
gacattcttcgacacgccccccatgctctttgtgttcattgccctgggtagatgg

SEQ ID NO: 9249 - RNA, 55 nt, synthetic construct
  source 1..55: mol_type = other RNA
gacattcttcgacacgccccccatgctctttgtgttcattgccctgggccggtgg

SEQ ID NO: 9250 - RNA, 55 nt, synthetic construct
  source 1..55: mol_type = other RNA
gacattcttcgacacgccccccatgctctttgtgttcattgccctggggagatgg

SEQ ID NO: 9251 - RNA, 56 nt, synthetic construct
  source 1..56: mol_type = other RNA
tgacattcttcgacacgccccccatgctctttgtgttcattgccctgggtcggtgg

SEQ ID NO: 9252 - RNA, 56 nt, synthetic construct
  source 1..56: mol_type = other RNA
tgacattcttcgacacgccccccatgctctttgtgttcattgccctgggccggtgg

SEQ ID NO: 9253 - RNA, 56 nt, synthetic construct
  source 1..56: mol_type = other RNA
tgacattcttcgacacgccccccatgctctttgtgttcattgccctgggaaggtgg

SEQ ID NO: 9254 - RNA, 56 nt, synthetic construct
  source 1..56: mol_type = other RNA
tgacattcttcgacacgccccccatgctctttgtgttcattgccctgggaagatgg

SEQ ID NO: 9255 - RNA, 56 nt, synthetic construct
  source 1..56: mol_type = other RNA
tgacattcttcgacacgccccccatgctctttgtgttcattgccctgggcaggtgg

SEQ ID NO: 9256 - RNA, 56 nt, synthetic construct
  source 1..56: mol_type = other RNA
tgacattcttcgacacgccccccatgctctttgtgttcattgccctggggcggtgg

SEQ ID NO: 9257 - RNA, 56 nt, synthetic construct
  source 1..56: mol_type = other RNA
tgacattcttcgacacgccccccatgctctttgtgttcattgccctgggcagatgg

SEQ ID NO: 9258 - RNA, 56 nt, synthetic construct
  source 1..56: mol_type = other RNA
tgacattcttcgacacgccccccatgctctttgtgttcattgccctggggagatgg

SEQ ID NO: 9259 - RNA, 56 nt, synthetic construct
  source 1..56: mol_type = other RNA
tgacattcttcgacacgccccccatgctctttgtgttcattgccctgggtaggtgg

SEQ ID NO: 9260 - RNA, 56 nt, synthetic construct
  source 1..56: mol_type = other RNA
tgacattcttcgacacgccccccatgctctttgtgttcattgccctggggaggtgg

SEQ ID NO: 9261 - RNA, 56 nt, synthetic construct
  source 1..56: mol_type = other RNA
tgacattcttcgacacgccccccatgctctttgtgttcattgccctgggacggtgg

SEQ ID NO: 9262 - RNA, 56 nt, synthetic construct
  source 1..56: mol_type = other RNA
tgacattcttcgacacgccccccatgctctttgtgttcattgccctgggtagatgg

SEQ ID NO: 9263 - RNA, 57 nt, synthetic construct
  source 1..57: mol_type = other RNA
gtgacattcttcgacacgccccccatgctctttgtgttcattgccctgggtaggtgg

SEQ ID NO: 9264 - RNA, 57 nt, synthetic construct
  source 1..57: mol_type = other RNA
gtgacattcttcgacacgccccccatgctctttgtgttcattgccctgggtagatgg

SEQ ID NO: 9265 - RNA, 57 nt, synthetic construct
  source 1..57: mol_type = other RNA
gtgacattcttcgacacgccccccatgctctttgtgttcattgccctgggaagatgg

SEQ ID NO: 9266 - RNA, 57 nt, synthetic construct
  source 1..57: mol_type = other RNA
gtgacattcttcgacacgccccccatgctctttgtgttcattgccctgggtcggtgg

SEQ ID NO: 9267 - RNA, 57 nt, synthetic construct
  source 1..57: mol_type = other RNA
gtgacattcttcgacacgccccccatgctctttgtgttcattgccctgggccggtgg

SEQ ID NO: 9268 - RNA, 57 nt, synthetic construct
  source 1..57: mol_type = other RNA
gtgacattcttcgacacgccccccatgctctttgtgttcattgccctggggagatgg

SEQ ID NO: 9269 - RNA, 57 nt, synthetic construct
  source 1..57: mol_type = other RNA
gtgacattcttcgacacgccccccatgctctttgtgttcattgccctgggcagatgg

SEQ ID NO: 9270 - RNA, 57 nt, synthetic construct
  source 1..57: mol_type = other RNA
gtgacattcttcgacacgccccccatgctctttgtgttcattgccctggggcggtgg

SEQ ID NO: 9271 - RNA, 57 nt, synthetic construct
  source 1..57: mol_type = other RNA
gtgacattcttcgacacgccccccatgctctttgtgttcattgccctgggacggtgg

SEQ ID NO: 9272 - RNA, 57 nt, synthetic construct
  source 1..57: mol_type = other RNA
gtgacattcttcgacacgccccccatgctctttgtgttcattgccctgggcaggtgg

SEQ ID NO: 9273 - RNA, 57 nt, synthetic construct
  source 1..57: mol_type = other RNA
gtgacattcttcgacacgccccccatgctctttgtgttcattgccctggggaggtgg

SEQ ID NO: 9274 - RNA, 57 nt, synthetic construct
  source 1..57: mol_type = other RNA
gtgacattcttcgacacgccccccatgctctttgtgttcattgccctgggaaggtgg

SEQ ID NO: 9275 - RNA, 58 nt, synthetic construct
  source 1..58: mol_type = other RNA
tgtgacattcttcgacacgccccccatgctctttgtgttcattgccctgggaagatgg

SEQ ID NO: 9276 - RNA, 58 nt, synthetic construct
  source 1..58: mol_type = other RNA
tgtgacattcttcgacacgccccccatgctctttgtgttcattgccctgggaaggtgg

SEQ ID NO: 9277 - RNA, 58 nt, synthetic construct
  source 1..58: mol_type = other RNA
tgtgacattcttcgacacgccccccatgctctttgtgttcattgccctgggcagatgg

SEQ ID NO: 9278 - RNA, 58 nt, synthetic construct
  source 1..58: mol_type = other RNA
tgtgacattcttcgacacgccccccatgctctttgtgttcattgccctggggcggtgg

SEQ ID NO: 9279 - RNA, 58 nt, synthetic construct
  source 1..58: mol_type = other RNA
tgtgacattcttcgacacgccccccatgctctttgtgttcattgccctggggagatgg

SEQ ID NO: 9280 - RNA, 58 nt, synthetic construct
  source 1..58: mol_type = other RNA
tgtgacattcttcgacacgccccccatgctctttgtgttcattgccctgggtaggtgg

SEQ ID NO: 9281 - RNA, 58 nt, synthetic construct
  source 1..58: mol_type = other RNA
tgtgacattcttcgacacgccccccatgctctttgtgttcattgccctgggtagatgg

SEQ ID NO: 9282 - RNA, 58 nt, synthetic construct
  source 1..58: mol_type = other RNA
tgtgacattcttcgacacgccccccatgctctttgtgttcattgccctgggccggtgg

SEQ ID NO: 9283 - RNA, 58 nt, synthetic construct
  source 1..58: mol_type = other RNA
tgtgacattcttcgacacgccccccatgctctttgtgttcattgccctgggcaggtgg

SEQ ID NO: 9284 - RNA, 58 nt, synthetic construct
  source 1..58: mol_type = other RNA
tgtgacattcttcgacacgccccccatgctctttgtgttcattgccctggggaggtgg

SEQ ID NO: 9285 - RNA, 58 nt, synthetic construct
  source 1..58: mol_type = other RNA
tgtgacattcttcgacacgccccccatgctctttgtgttcattgccctgggtcggtgg

SEQ ID NO: 9286 - RNA, 58 nt, synthetic construct
  source 1..58: mol_type = other RNA
tgtgacattcttcgacacgccccccatgctctttgtgttcattgccctgggacggtgg

SEQ ID NO: 9287 - RNA, 59 nt, synthetic construct
  source 1..59: mol_type = other RNA
ctgtgacattcttcgacacgccccccatgctctttgtgttcattgccctggggagatgg

SEQ ID NO: 9288 - RNA, 59 nt, synthetic construct
  source 1..59: mol_type = other RNA
ctgtgacattcttcgacacgccccccatgctctttgtgttcattgccctgggacggtgg

SEQ ID NO: 9289 - RNA, 59 nt, synthetic construct
  source 1..59: mol_type = other RNA
ctgtgacattcttcgacacgccccccatgctctttgtgttcattgccctgggccggtgg

SEQ ID NO: 9290 - RNA, 59 nt, synthetic construct
  source 1..59: mol_type = other RNA
ctgtgacattcttcgacacgccccccatgctctttgtgttcattgccctgggtcggtgg

SEQ ID NO: 9291 - RNA, 59 nt, synthetic construct
  source 1..59: mol_type = other RNA
ctgtgacattcttcgacacgccccccatgctctttgtgttcattgccctgggcaggtgg

SEQ ID NO: 9292 - RNA, 59 nt, synthetic construct
  source 1..59: mol_type = other RNA
ctgtgacattcttcgacacgccccccatgctctttgtgttcattgccctgggtaggtgg

SEQ ID NO: 9293 - RNA, 59 nt, synthetic construct
  source 1..59: mol_type = other RNA
ctgtgacattcttcgacacgccccccatgctctttgtgttcattgccctggggaggtgg

SEQ ID NO: 9294 - RNA, 59 nt, synthetic construct
  source 1..59: mol_type = other RNA
ctgtgacattcttcgacacgccccccatgctctttgtgttcattgccctgggaaggtgg

SEQ ID NO: 9295 - RNA, 59 nt, synthetic construct
  source 1..59: mol_type = other RNA
ctgtgacattcttcgacacgccccccatgctctttgtgttcattgccctggggcggtgg

SEQ ID NO: 9296 - RNA, 59 nt, synthetic construct
  source 1..59: mol_type = other RNA
ctgtgacattcttcgacacgccccccatgctctttgtgttcattgccctgggcagatgg

SEQ ID NO: 9297 - RNA, 59 nt, synthetic construct
  source 1..59: mol_type = other RNA
ctgtgacattcttcgacacgccccccatgctctttgtgttcattgccctgggtagatgg

SEQ ID NO: 9298 - RNA, 59 nt, synthetic construct
  source 1..59: mol_type = other RNA
ctgtgacattcttcgacacgccccccatgctctttgtgttcattgccctgggaagatgg

SEQ ID NO: 9299 - RNA, 60 nt, synthetic construct
  source 1..60: mol_type = other RNA
cctgtgacattcttcgacacgccccccatgctctttgtgttcattgccctgggccggtgg

SEQ ID NO: 9300 - RNA, 60 nt, synthetic construct
  source 1..60: mol_type = other RNA
cctgtgacattcttcgacacgccccccatgctctttgtgttcattgccctgggcagatgg

SEQ ID NO: 9301 - RNA, 60 nt, synthetic construct
  source 1..60: mol_type = other RNA
cctgtgacattcttcgacacgccccccatgctctttgtgttcattgccctggggagatgg

SEQ ID NO: 9302 - RNA, 60 nt, synthetic construct
  source 1..60: mol_type = other RNA
cctgtgacattcttcgacacgccccccatgctctttgtgttcattgccctgggtaggtgg

SEQ ID NO: 9303 - RNA, 60 nt, synthetic construct
  source 1..60: mol_type = other RNA
cctgtgacattcttcgacacgccccccatgctctttgtgttcattgccctggggaggtgg

SEQ ID NO: 9304 - RNA, 60 nt, synthetic construct
  source 1..60: mol_type = other RNA
cctgtgacattcttcgacacgccccccatgctctttgtgttcattgccctgggacggtgg

SEQ ID NO: 9305 - RNA, 60 nt, synthetic construct
  source 1..60: mol_type = other RNA
cctgtgacattcttcgacacgccccccatgctctttgtgttcattgccctgggtagatgg

SEQ ID NO: 9306 - RNA, 60 nt, synthetic construct
  source 1..60: mol_type = other RNA
cctgtgacattcttcgacacgccccccatgctctttgtgttcattgccctgggtcggtgg

SEQ ID NO: 9307 - RNA, 60 nt, synthetic construct
  source 1..60: mol_type = other RNA
cctgtgacattcttcgacacgccccccatgctctttgtgttcattgccctgggaagatgg

SEQ ID NO: 9308 - RNA, 60 nt, synthetic construct
  source 1..60: mol_type = other RNA
cctgtgacattcttcgacacgccccccatgctctttgtgttcattgccctgggaaggtgg

SEQ ID NO: 9309 - RNA, 60 nt, synthetic construct
  source 1..60: mol_type = other RNA
cctgtgacattcttcgacacgccccccatgctctttgtgttcattgccctgggcaggtgg

SEQ ID NO: 9310 - RNA, 60 nt, synthetic construct
  source 1..60: mol_type = other RNA
cctgtgacattcttcgacacgccccccatgctctttgtgttcattgccctggggcggtgg

SEQ ID NO: 9311 - RNA, 61 nt, synthetic construct
  source 1..61: mol_type = other RNA
ccctgtgacattcttcgacacgccccccatgctctttgtgttcattgccctgggcagatgg

SEQ ID NO: 9312 - RNA, 61 nt, synthetic construct
  source 1..61: mol_type = other RNA
ccctgtgacattcttcgacacgccccccatgctctttgtgttcattgccctggggagatgg

SEQ ID NO: 9313 - RNA, 61 nt, synthetic construct
  source 1..61: mol_type = other RNA
ccctgtgacattcttcgacacgccccccatgctctttgtgttcattgccctgggaagatgg

SEQ ID NO: 9314 - RNA, 61 nt, synthetic construct
  source 1..61: mol_type = other RNA
ccctgtgacattcttcgacacgccccccatgctctttgtgttcattgccctgggccggtgg

SEQ ID NO: 9315 - RNA, 61 nt, synthetic construct
  source 1..61: mol_type = other RNA
ccctgtgacattcttcgacacgccccccatgctctttgtgttcattgccctggggaggtgg

SEQ ID NO: 9316 - RNA, 61 nt, synthetic construct
  source 1..61: mol_type = other RNA
ccctgtgacattcttcgacacgccccccatgctctttgtgttcattgccctgggcaggtgg

SEQ ID NO: 9317 - RNA, 61 nt, synthetic construct
  source 1..61: mol_type = other RNA
ccctgtgacattcttcgacacgccccccatgctctttgtgttcattgccctgggacggtgg

SEQ ID NO: 9318 - RNA, 61 nt, synthetic construct
  source 1..61: mol_type = other RNA
ccctgtgacattcttcgacacgccccccatgctctttgtgttcattgccctggggcggtgg

SEQ ID NO: 9319 - RNA, 61 nt, synthetic construct
  source 1..61: mol_type = other RNA
ccctgtgacattcttcgacacgccccccatgctctttgtgttcattgccctgggtagatgg

SEQ ID NO: 9320 - RNA, 61 nt, synthetic construct
  source 1..61: mol_type = other RNA
ccctgtgacattcttcgacacgccccccatgctctttgtgttcattgccctgggtaggtgg

SEQ ID NO: 9321 - RNA, 61 nt, synthetic construct
  source 1..61: mol_type = other RNA
ccctgtgacattcttcgacacgccccccatgctctttgtgttcattgccctgggtcggtgg

SEQ ID NO: 9322 - RNA, 61 nt, synthetic construct
  source 1..61: mol_type = other RNA
ccctgtgacattcttcgacacgccccccatgctctttgtgttcattgccctgggaaggtgg

SEQ ID NO: 9323 - RNA, 62 nt, synthetic construct
  source 1..62: mol_type = other RNA
gccctgtgacattcttcgacacgccccccatgctctttgtgttcattgccctggggaggtgg

SEQ ID NO: 9324 - RNA, 62 nt, synthetic construct
  source 1..62: mol_type = other RNA
gccctgtgacattcttcgacacgccccccatgctctttgtgttcattgccctgggtaggtgg

SEQ ID NO: 9325 - RNA, 62 nt, synthetic construct
  source 1..62: mol_type = other RNA
gccctgtgacattcttcgacacgccccccatgctctttgtgttcattgccctgggccggtgg

SEQ ID NO: 9326 - RNA, 62 nt, synthetic construct
  source 1..62: mol_type = other RNA
gccctgtgacattcttcgacacgccccccatgctctttgtgttcattgccctgggaagatgg

SEQ ID NO: 9327 - RNA, 62 nt, synthetic construct
  source 1..62: mol_type = other RNA
gccctgtgacattcttcgacacgccccccatgctctttgtgttcattgccctgggacggtgg

SEQ ID NO: 9328 - RNA, 62 nt, synthetic construct
  source 1..62: mol_type = other RNA
gccctgtgacattcttcgacacgccccccatgctctttgtgttcattgccctgggtcggtgg

SEQ ID NO: 9329 - RNA, 62 nt, synthetic construct
  source 1..62: mol_type = other RNA
gccctgtgacattcttcgacacgccccccatgctctttgtgttcattgccctggggagatgg

SEQ ID NO: 9330 - RNA, 62 nt, synthetic construct
  source 1..62: mol_type = other RNA
gccctgtgacattcttcgacacgccccccatgctctttgtgttcattgccctggggcggtgg

SEQ ID NO: 9331 - RNA, 62 nt, synthetic construct
  source 1..62: mol_type = other RNA
gccctgtgacattcttcgacacgccccccatgctctttgtgttcattgccctgggcaggtgg

SEQ ID NO: 9332 - RNA, 62 nt, synthetic construct
  source 1..62: mol_type = other RNA
gccctgtgacattcttcgacacgccccccatgctctttgtgttcattgccctgggtagatgg

SEQ ID NO: 9333 - RNA, 62 nt, synthetic construct
  source 1..62: mol_type = other RNA
gccctgtgacattcttcgacacgccccccatgctctttgtgttcattgccctgggcagatgg

SEQ ID NO: 9334 - RNA, 62 nt, synthetic construct
  source 1..62: mol_type = other RNA
gccctgtgacattcttcgacacgccccccatgctctttgtgttcattgccctgggaaggtgg

SEQ ID NO: 9335 - RNA, 63 nt, synthetic construct
  source 1..63: mol_type = other RNA
agccctgtgacattcttcgacacgccccccatgctctttgtgttcattgccctgggcaggtgg

SEQ ID NO: 9336 - RNA, 63 nt, synthetic construct
  source 1..63: mol_type = other RNA
agccctgtgacattcttcgacacgccccccatgctctttgtgttcattgccctggggcggtgg

SEQ ID NO: 9337 - RNA, 63 nt, synthetic construct
  source 1..63: mol_type = other RNA
agccctgtgacattcttcgacacgccccccatgctctttgtgttcattgccctgggcagatgg

SEQ ID NO: 9338 - RNA, 63 nt, synthetic construct
  source 1..63: mol_type = other RNA
agccctgtgacattcttcgacacgccccccatgctctttgtgttcattgccctgggaagatgg

SEQ ID NO: 9339 - RNA, 63 nt, synthetic construct
  source 1..63: mol_type = other RNA
agccctgtgacattcttcgacacgccccccatgctctttgtgttcattgccctgggaaggtgg

SEQ ID NO: 9340 - RNA, 63 nt, synthetic construct
  source 1..63: mol_type = other RNA
agccctgtgacattcttcgacacgccccccatgctctttgtgttcattgccctgggtagatgg

SEQ ID NO: 9341 - RNA, 63 nt, synthetic construct
  source 1..63: mol_type = other RNA
agccctgtgacattcttcgacacgccccccatgctctttgtgttcattgccctggggagatgg

SEQ ID NO: 9342 - RNA, 63 nt, synthetic construct
  source 1..63: mol_type = other RNA
agccctgtgacattcttcgacacgccccccatgctctttgtgttcattgccctgggccggtgg

SEQ ID NO: 9343 - RNA, 63 nt, synthetic construct
  source 1..63: mol_type = other RNA
agccctgtgacattcttcgacacgccccccatgctctttgtgttcattgccctgggtaggtgg

SEQ ID NO: 9344 - RNA, 63 nt, synthetic construct
  source 1..63: mol_type = other RNA
agccctgtgacattcttcgacacgccccccatgctctttgtgttcattgccctgggacggtgg

SEQ ID NO: 9345 - RNA, 63 nt, synthetic construct
  source 1..63: mol_type = other RNA
agccctgtgacattcttcgacacgccccccatgctctttgtgttcattgccctggggaggtgg

SEQ ID NO: 9346 - RNA, 63 nt, synthetic construct
  source 1..63: mol_type = other RNA
agccctgtgacattcttcgacacgccccccatgctctttgtgttcattgccctgggtcggtgg

SEQ ID NO: 9347 - RNA, 64 nt, synthetic construct
  source 1..64: mol_type = other RNA
gagccctgtgacattcttcgacacgccccccatgctctttgtgttcattgccctgggaaggtgg

SEQ ID NO: 9348 - RNA, 64 nt, synthetic construct
  source 1..64: mol_type = other RNA
gagccctgtgacattcttcgacacgccccccatgctctttgtgttcattgccctgggtagatgg

SEQ ID NO: 9349 - RNA, 64 nt, synthetic construct
  source 1..64: mol_type = other RNA
gagccctgtgacattcttcgacacgccccccatgctctttgtgttcattgccctggggaggtgg

SEQ ID NO: 9350 - RNA, 64 nt, synthetic construct
  source 1..64: mol_type = other RNA
gagccctgtgacattcttcgacacgccccccatgctctttgtgttcattgccctgggtaggtgg

SEQ ID NO: 9351 - RNA, 64 nt, synthetic construct
  source 1..64: mol_type = other RNA
gagccctgtgacattcttcgacacgccccccatgctctttgtgttcattgccctggggagatgg

SEQ ID NO: 9352 - RNA, 64 nt, synthetic construct
  source 1..64: mol_type = other RNA
gagccctgtgacattcttcgacacgccccccatgctctttgtgttcattgccctgggcagatgg

SEQ ID NO: 9353 - RNA, 64 nt, synthetic construct
  source 1..64: mol_type = other RNA
gagccctgtgacattcttcgacacgccccccatgctctttgtgttcattgccctggggcggtgg

SEQ ID NO: 9354 - RNA, 64 nt, synthetic construct
  source 1..64: mol_type = other RNA
gagccctgtgacattcttcgacacgccccccatgctctttgtgttcattgccctgggtcggtgg

SEQ ID NO: 9355 - RNA, 64 nt, synthetic construct
  source 1..64: mol_type = other RNA
gagccctgtgacattcttcgacacgccccccatgctctttgtgttcattgccctgggcaggtgg

SEQ ID NO: 9356 - RNA, 64 nt, synthetic construct
  source 1..64: mol_type = other RNA
gagccctgtgacattcttcgacacgccccccatgctctttgtgttcattgccctgggacggtgg

SEQ ID NO: 9357 - RNA, 64 nt, synthetic construct
  source 1..64: mol_type = other RNA
gagccctgtgacattcttcgacacgccccccatgctctttgtgttcattgccctgggccggtgg

SEQ ID NO: 9358 - RNA, 64 nt, synthetic construct
  source 1..64: mol_type = other RNA
gagccctgtgacattcttcgacacgccccccatgctctttgtgttcattgccctgggaagatgg

SEQ ID NO: 9359 - RNA, 65 nt, synthetic construct
  source 1..65: mol_type = other RNA
ggagccctgtgacattcttcgacacgccccccatgctctttgtgttcattgccctgggtcggtgg

SEQ ID NO: 9360 - RNA, 65 nt, synthetic construct
  source 1..65: mol_type = other RNA
ggagccctgtgacattcttcgacacgccccccatgctctttgtgttcattgccctgggcaggtgg

SEQ ID NO: 9361 - RNA, 65 nt, synthetic construct
  source 1..65: mol_type = other RNA
ggagccctgtgacattcttcgacacgccccccatgctctttgtgttcattgccctgggaagatgg

SEQ ID NO: 9362 - RNA, 65 nt, synthetic construct
  source 1..65: mol_type = other RNA
ggagccctgtgacattcttcgacacgccccccatgctctttgtgttcattgccctggggagatgg

SEQ ID NO: 9363 - RNA, 65 nt, synthetic construct
  source 1..65: mol_type = other RNA
ggagccctgtgacattcttcgacacgccccccatgctctttgtgttcattgccctggggcggtgg

SEQ ID NO: 9364 - RNA, 65 nt, synthetic construct
  source 1..65: mol_type = other RNA
ggagccctgtgacattcttcgacacgccccccatgctctttgtgttcattgccctgggaaggtgg

SEQ ID NO: 9365 - RNA, 65 nt, synthetic construct
  source 1..65: mol_type = other RNA
ggagccctgtgacattcttcgacacgccccccatgctctttgtgttcattgccctgggacggtgg

SEQ ID NO: 9366 - RNA, 65 nt, synthetic construct
  source 1..65: mol_type = other RNA
ggagccctgtgacattcttcgacacgccccccatgctctttgtgttcattgccctgggtagatgg

SEQ ID NO: 9367 - RNA, 65 nt, synthetic construct
  source 1..65: mol_type = other RNA
ggagccctgtgacattcttcgacacgccccccatgctctttgtgttcattgccctggggaggtgg

SEQ ID NO: 9368 - RNA, 65 nt, synthetic construct
  source 1..65: mol_type = other RNA
ggagccctgtgacattcttcgacacgccccccatgctctttgtgttcattgccctgggcagatgg

SEQ ID NO: 9369 - RNA, 65 nt, synthetic construct
  source 1..65: mol_type = other RNA
ggagccctgtgacattcttcgacacgccccccatgctctttgtgttcattgccctgggccggtgg

SEQ ID NO: 9370 - RNA, 65 nt, synthetic construct
  source 1..65: mol_type = other RNA
ggagccctgtgacattcttcgacacgccccccatgctctttgtgttcattgccctgggtaggtgg

SEQ ID NO: 9371 - RNA, 66 nt, synthetic construct
  source 1..66: mol_type = other RNA
aggagccctgtgacattcttcgacacgccccccatgctctttgtgttcattgccctgggtaggtgg

SEQ ID NO: 9372 - RNA, 66 nt, synthetic construct
  source 1..66: mol_type = other RNA
aggagccctgtgacattcttcgacacgccccccatgctctttgtgttcattgccctgggaagatgg

SEQ ID NO: 9373 - RNA, 66 nt, synthetic construct
  source 1..66: mol_type = other RNA
aggagccctgtgacattcttcgacacgccccccatgctctttgtgttcattgccctgggtagatgg

SEQ ID NO: 9374 - RNA, 66 nt, synthetic construct
  source 1..66: mol_type = other RNA
aggagccctgtgacattcttcgacacgccccccatgctctttgtgttcattgccctgggacggtgg

SEQ ID NO: 9375 - RNA, 66 nt, synthetic construct
  source 1..66: mol_type = other RNA
aggagccctgtgacattcttcgacacgccccccatgctctttgtgttcattgccctggggaggtgg

SEQ ID NO: 9376 - RNA, 66 nt, synthetic construct
  source 1..66: mol_type = other RNA
aggagccctgtgacattcttcgacacgccccccatgctctttgtgttcattgccctgggaaggtgg

SEQ ID NO: 9377 - RNA, 66 nt, synthetic construct
  source 1..66: mol_type = other RNA
aggagccctgtgacattcttcgacacgccccccatgctctttgtgttcattgccctggggcggtgg

SEQ ID NO: 9378 - RNA, 66 nt, synthetic construct
  source 1..66: mol_type = other RNA
aggagccctgtgacattcttcgacacgccccccatgctctttgtgttcattgccctggggagatgg

SEQ ID NO: 9379 - RNA, 66 nt, synthetic construct
  source 1..66: mol_type = other RNA
aggagccctgtgacattcttcgacacgccccccatgctctttgtgttcattgccctgggtcggtgg

SEQ ID NO: 9380 - RNA, 66 nt, synthetic construct
  source 1..66: mol_type = other RNA
aggagccctgtgacattcttcgacacgccccccatgctctttgtgttcattgccctgggccggtgg

SEQ ID NO: 9381 - RNA, 66 nt, synthetic construct
  source 1..66: mol_type = other RNA
aggagccctgtgacattcttcgacacgccccccatgctctttgtgttcattgccctgggcaggtgg

SEQ ID NO: 9382 - RNA, 66 nt, synthetic construct
  source 1..66: mol_type = other RNA
aggagccctgtgacattcttcgacacgccccccatgctctttgtgttcattgccctgggcagatgg

SEQ ID NO: 9383 - RNA, 67 nt, synthetic construct
  source 1..67: mol_type = other RNA
gaggagccctgtgacattcttcgacacgccccccatgctctttgtgttcattgccctgggccggtgg

SEQ ID NO: 9384 - RNA, 67 nt, synthetic construct
  source 1..67: mol_type = other RNA
gaggagccctgtgacattcttcgacacgccccccatgctctttgtgttcattgccctgggaaggtgg

SEQ ID NO: 9385 - RNA, 67 nt, synthetic construct
  source 1..67: mol_type = other RNA
gaggagccctgtgacattcttcgacacgccccccatgctctttgtgttcattgccctgggtaggtgg

SEQ ID NO: 9386 - RNA, 67 nt, synthetic construct
  source 1..67: mol_type = other RNA
gaggagccctgtgacattcttcgacacgccccccatgctctttgtgttcattgccctgggacggtgg

SEQ ID NO: 9387 - RNA, 67 nt, synthetic construct
  source 1..67: mol_type = other RNA
gaggagccctgtgacattcttcgacacgccccccatgctctttgtgttcattgccctgggtagatgg

SEQ ID NO: 9388 - RNA, 67 nt, synthetic construct
  source 1..67: mol_type = other RNA
gaggagccctgtgacattcttcgacacgccccccatgctctttgtgttcattgccctggggcggtgg

SEQ ID NO: 9389 - RNA, 67 nt, synthetic construct
  source 1..67: mol_type = other RNA
gaggagccctgtgacattcttcgacacgccccccatgctctttgtgttcattgccctgggaagatgg

SEQ ID NO: 9390 - RNA, 67 nt, synthetic construct
  source 1..67: mol_type = other RNA
gaggagccctgtgacattcttcgacacgccccccatgctctttgtgttcattgccctggggagatgg

SEQ ID NO: 9391 - RNA, 67 nt, synthetic construct
  source 1..67: mol_type = other RNA
gaggagccctgtgacattcttcgacacgccccccatgctctttgtgttcattgccctgggtcggtgg

SEQ ID NO: 9392 - RNA, 67 nt, synthetic construct
  source 1..67: mol_type = other RNA
gaggagccctgtgacattcttcgacacgccccccatgctctttgtgttcattgccctggggaggtgg

SEQ ID NO: 9393 - RNA, 67 nt, synthetic construct
  source 1..67: mol_type = other RNA
gaggagccctgtgacattcttcgacacgccccccatgctctttgtgttcattgccctgggcaggtgg

SEQ ID NO: 9394 - RNA, 67 nt, synthetic construct
  source 1..67: mol_type = other RNA
gaggagccctgtgacattcttcgacacgccccccatgctctttgtgttcattgccctgggcagatgg

SEQ ID NO: 9395 - RNA, 68 nt, synthetic construct
  source 1..68: mol_type = other RNA
agaggagccctgtgacattcttcgacacgccccccatgctctttgtgttcattgccctgggaagatgg

SEQ ID NO: 9396 - RNA, 68 nt, synthetic construct
  source 1..68: mol_type = other RNA
agaggagccctgtgacattcttcgacacgccccccatgctctttgtgttcattgccctgggcagatgg

SEQ ID NO: 9397 - RNA, 68 nt, synthetic construct
  source 1..68: mol_type = other RNA
agaggagccctgtgacattcttcgacacgccccccatgctctttgtgttcattgccctggggagatgg

SEQ ID NO: 9398 - RNA, 68 nt, synthetic construct
  source 1..68: mol_type = other RNA
agaggagccctgtgacattcttcgacacgccccccatgctctttgtgttcattgccctggggcggtgg

SEQ ID NO: 9399 - RNA, 68 nt, synthetic construct
  source 1..68: mol_type = other RNA
agaggagccctgtgacattcttcgacacgccccccatgctctttgtgttcattgccctgggtcggtgg

SEQ ID NO: 9400 - RNA, 68 nt, synthetic construct
  source 1..68: mol_type = other RNA
agaggagccctgtgacattcttcgacacgccccccatgctctttgtgttcattgccctgggtaggtgg

SEQ ID NO: 9401 - RNA, 68 nt, synthetic construct
  source 1..68: mol_type = other RNA
agaggagccctgtgacattcttcgacacgccccccatgctctttgtgttcattgccctgggaaggtgg

SEQ ID NO: 9402 - RNA, 68 nt, synthetic construct
  source 1..68: mol_type = other RNA
agaggagccctgtgacattcttcgacacgccccccatgctctttgtgttcattgccctggggaggtgg

SEQ ID NO: 9403 - RNA, 68 nt, synthetic construct
  source 1..68: mol_type = other RNA
agaggagccctgtgacattcttcgacacgccccccatgctctttgtgttcattgccctgggccggtgg

SEQ ID NO: 9404 - RNA, 68 nt, synthetic construct
  source 1..68: mol_type = other RNA
agaggagccctgtgacattcttcgacacgccccccatgctctttgtgttcattgccctgggtagatgg

SEQ ID NO: 9405 - RNA, 68 nt, synthetic construct
  source 1..68: mol_type = other RNA
agaggagccctgtgacattcttcgacacgccccccatgctctttgtgttcattgccctgggacggtgg

SEQ ID NO: 9406 - RNA, 68 nt, synthetic construct
  source 1..68: mol_type = other RNA
agaggagccctgtgacattcttcgacacgccccccatgctctttgtgttcattgccctgggcaggtgg

SEQ ID NO: 9407 - RNA, 69 nt, synthetic construct
  source 1..69: mol_type = other RNA
gagaggagccctgtgacattcttcgacacgccccccatgctctttgtgttcattgccctggggcggtgg

SEQ ID NO: 9408 - RNA, 69 nt, synthetic construct
  source 1..69: mol_type = other RNA
gagaggagccctgtgacattcttcgacacgccccccatgctctttgtgttcattgccctgggaagatgg

SEQ ID NO: 9409 - RNA, 69 nt, synthetic construct
  source 1..69: mol_type = other RNA
gagaggagccctgtgacattcttcgacacgccccccatgctctttgtgttcattgccctgggccggtgg

SEQ ID NO: 9410 - RNA, 69 nt, synthetic construct
  source 1..69: mol_type = other RNA
gagaggagccctgtgacattcttcgacacgccccccatgctctttgtgttcattgccctgggacggtgg

SEQ ID NO: 9411 - RNA, 69 nt, synthetic construct
  source 1..69: mol_type = other RNA
gagaggagccctgtgacattcttcgacacgccccccatgctctttgtgttcattgccctgggtagatgg

SEQ ID NO: 9412 - RNA, 69 nt, synthetic construct
  source 1..69: mol_type = other RNA
gagaggagccctgtgacattcttcgacacgccccccatgctctttgtgttcattgccctgggaaggtgg

SEQ ID NO: 9413 - RNA, 69 nt, synthetic construct
  source 1..69: mol_type = other RNA
gagaggagccctgtgacattcttcgacacgccccccatgctctttgtgttcattgccctgggtaggtgg

SEQ ID NO: 9414 - RNA, 69 nt, synthetic construct
  source 1..69: mol_type = other RNA
gagaggagccctgtgacattcttcgacacgccccccatgctctttgtgttcattgccctgggcagatgg

SEQ ID NO: 9415 - RNA, 69 nt, synthetic construct
  source 1..69: mol_type = other RNA
gagaggagccctgtgacattcttcgacacgccccccatgctctttgtgttcattgccctgggtcggtgg

SEQ ID NO: 9416 - RNA, 69 nt, synthetic construct
  source 1..69: mol_type = other RNA
gagaggagccctgtgacattcttcgacacgccccccatgctctttgtgttcattgccctgggcaggtgg

SEQ ID NO: 9417 - RNA, 69 nt, synthetic construct
  source 1..69: mol_type = other RNA
gagaggagccctgtgacattcttcgacacgccccccatgctctttgtgttcattgccctggggagatgg

SEQ ID NO: 9418 - RNA, 69 nt, synthetic construct
  source 1..69: mol_type = other RNA
gagaggagccctgtgacattcttcgacacgccccccatgctctttgtgttcattgccctggggaggtgg

SEQ ID NO: 9419 - RNA, 70 nt, synthetic construct
  source 1..70: mol_type = other RNA
ggagaggagccctgtgacattcttcgacacgccccccatgctctttgtgttcattgccctggggaggtgg

SEQ ID NO: 9420 - RNA, 70 nt, synthetic construct
  source 1..70: mol_type = other RNA
ggagaggagccctgtgacattcttcgacacgccccccatgctctttgtgttcattgccctgggccggtgg

SEQ ID NO: 9421 - RNA, 70 nt, synthetic construct
  source 1..70: mol_type = other RNA
ggagaggagccctgtgacattcttcgacacgccccccatgctctttgtgttcattgccctgggacggtgg

SEQ ID NO: 9422 - RNA, 70 nt, synthetic construct
  source 1..70: mol_type = other RNA
ggagaggagccctgtgacattcttcgacacgccccccatgctctttgtgttcattgccctgggaagatgg

SEQ ID NO: 9423 - RNA, 70 nt, synthetic construct
  source 1..70: mol_type = other RNA
ggagaggagccctgtgacattcttcgacacgccccccatgctctttgtgttcattgccctggggagatgg

SEQ ID NO: 9424 - RNA, 70 nt, synthetic construct
  source 1..70: mol_type = other RNA
ggagaggagccctgtgacattcttcgacacgccccccatgctctttgtgttcattgccctgggtaggtgg

SEQ ID NO: 9425 - RNA, 70 nt, synthetic construct
  source 1..70: mol_type = other RNA
ggagaggagccctgtgacattcttcgacacgccccccatgctctttgtgttcattgccctgggtcggtgg

SEQ ID NO: 9426 - RNA, 70 nt, synthetic construct
  source 1..70: mol_type = other RNA
ggagaggagccctgtgacattcttcgacacgccccccatgctctttgtgttcattgccctgggcagatgg

SEQ ID NO: 9427 - RNA, 70 nt, synthetic construct
  source 1..70: mol_type = other RNA
ggagaggagccctgtgacattcttcgacacgccccccatgctctttgtgttcattgccctgggaaggtgg

SEQ ID NO: 9428 - RNA, 70 nt, synthetic construct
  source 1..70: mol_type = other RNA
ggagaggagccctgtgacattcttcgacacgccccccatgctctttgtgttcattgccctggggcggtgg

SEQ ID NO: 9429 - RNA, 70 nt, synthetic construct
  source 1..70: mol_type = other RNA
ggagaggagccctgtgacattcttcgacacgccccccatgctctttgtgttcattgccctgggtagatgg

SEQ ID NO: 9430 - RNA, 70 nt, synthetic construct
  source 1..70: mol_type = other RNA
ggagaggagccctgtgacattcttcgacacgccccccatgctctttgtgttcattgccctgggcaggtgg

SEQ ID NO: 9431 - RNA, 71 nt, synthetic construct
  source 1..71: mol_type = other RNA
cggagaggagccctgtgacattcttcgacacgccccccatgctctttgtgttcattgccctgggacggtgg

SEQ ID NO: 9432 - RNA, 71 nt, synthetic construct
  source 1..71: mol_type = other RNA
cggagaggagccctgtgacattcttcgacacgccccccatgctctttgtgttcattgccctgggcaggtgg

SEQ ID NO: 9433 - RNA, 71 nt, synthetic construct
  source 1..71: mol_type = other RNA
cggagaggagccctgtgacattcttcgacacgccccccatgctctttgtgttcattgccctgggaaggtgg

SEQ ID NO: 9434 - RNA, 71 nt, synthetic construct
  source 1..71: mol_type = other RNA
cggagaggagccctgtgacattcttcgacacgccccccatgctctttgtgttcattgccctggggagatgg

SEQ ID NO: 9435 - RNA, 71 nt, synthetic construct
  source 1..71: mol_type = other RNA
cggagaggagccctgtgacattcttcgacacgccccccatgctctttgtgttcattgccctgggccggtgg

SEQ ID NO: 9436 - RNA, 71 nt, synthetic construct
  source 1..71: mol_type = other RNA
cggagaggagccctgtgacattcttcgacacgccccccatgctctttgtgttcattgccctgggtcggtgg

SEQ ID NO: 9437 - RNA, 71 nt, synthetic construct
  source 1..71: mol_type = other RNA
cggagaggagccctgtgacattcttcgacacgccccccatgctctttgtgttcattgccctgggaagatgg

SEQ ID NO: 9438 - RNA, 71 nt, synthetic construct
  source 1..71: mol_type = other RNA
cggagaggagccctgtgacattcttcgacacgccccccatgctctttgtgttcattgccctgggcagatgg

SEQ ID NO: 9439 - RNA, 71 nt, synthetic construct
  source 1..71: mol_type = other RNA
cggagaggagccctgtgacattcttcgacacgccccccatgctctttgtgttcattgccctggggcggtgg

SEQ ID NO: 9440 - RNA, 71 nt, synthetic construct
  source 1..71: mol_type = other RNA
cggagaggagccctgtgacattcttcgacacgccccccatgctctttgtgttcattgccctgggtaggtgg

SEQ ID NO: 9441 - RNA, 71 nt, synthetic construct
  source 1..71: mol_type = other RNA
cggagaggagccctgtgacattcttcgacacgccccccatgctctttgtgttcattgccctgggtagatgg

SEQ ID NO: 9442 - RNA, 71 nt, synthetic construct
  source 1..71: mol_type = other RNA
cggagaggagccctgtgacattcttcgacacgccccccatgctctttgtgttcattgccctggggaggtgg

SEQ ID NO: 9443 - RNA, 72 nt, synthetic construct
  source 1..72: mol_type = other RNA
gcggagaggagccctgtgacattcttcgacacgccccccatgctctttgtgttcattgccctgggccggtgg

SEQ ID NO: 9444 - RNA, 72 nt, synthetic construct
  source 1..72: mol_type = other RNA
gcggagaggagccctgtgacattcttcgacacgccccccatgctctttgtgttcattgccctggggcggtgg

SEQ ID NO: 9445 - RNA, 72 nt, synthetic construct
  source 1..72: mol_type = other RNA
gcggagaggagccctgtgacattcttcgacacgccccccatgctctttgtgttcattgccctggggagatgg

SEQ ID NO: 9446 - RNA, 72 nt, synthetic construct
  source 1..72: mol_type = other RNA
gcggagaggagccctgtgacattcttcgacacgccccccatgctctttgtgttcattgccctgggtaggtgg

SEQ ID NO: 9447 - RNA, 72 nt, synthetic construct
  source 1..72: mol_type = other RNA
gcggagaggagccctgtgacattcttcgacacgccccccatgctctttgtgttcattgccctggggaggtgg

SEQ ID NO: 9448 - RNA, 72 nt, synthetic construct
  source 1..72: mol_type = other RNA
gcggagaggagccctgtgacattcttcgacacgccccccatgctctttgtgttcattgccctgggcagatgg

SEQ ID NO: 9449 - RNA, 72 nt, synthetic construct
  source 1..72: mol_type = other RNA
gcggagaggagccctgtgacattcttcgacacgccccccatgctctttgtgttcattgccctgggacggtgg

SEQ ID NO: 9450 - RNA, 72 nt, synthetic construct
  source 1..72: mol_type = other RNA
gcggagaggagccctgtgacattcttcgacacgccccccatgctctttgtgttcattgccctgggtcggtgg

SEQ ID NO: 9451 - RNA, 72 nt, synthetic construct
  source 1..72: mol_type = other RNA
gcggagaggagccctgtgacattcttcgacacgccccccatgctctttgtgttcattgccctgggcaggtgg

SEQ ID NO: 9452 - RNA, 72 nt, synthetic construct
  source 1..72: mol_type = other RNA
gcggagaggagccctgtgacattcttcgacacgccccccatgctctttgtgttcattgccctgggaaggtgg

SEQ ID NO: 9453 - RNA, 72 nt, synthetic construct
  source 1..72: mol_type = other RNA
gcggagaggagccctgtgacattcttcgacacgccccccatgctctttgtgttcattgccctgggtagatgg

SEQ ID NO: 9454 - RNA, 72 nt, synthetic construct
  source 1..72: mol_type = other RNA
gcggagaggagccctgtgacattcttcgacacgccccccatgctctttgtgttcattgccctgggaagatgg

SEQ ID NO: 9455 - RNA, 73 nt, synthetic construct
  source 1..73: mol_type = other RNA
ggcggagaggagccctgtgacattcttcgacacgccccccatgctctttgtgttcattgccctgggtaggtgg

SEQ ID NO: 9456 - RNA, 73 nt, synthetic construct
  source 1..73: mol_type = other RNA
ggcggagaggagccctgtgacattcttcgacacgccccccatgctctttgtgttcattgccctgggcagatgg

SEQ ID NO: 9457 - RNA, 73 nt, synthetic construct
  source 1..73: mol_type = other RNA
ggcggagaggagccctgtgacattcttcgacacgccccccatgctctttgtgttcattgccctgggacggtgg

SEQ ID NO: 9458 - RNA, 73 nt, synthetic construct
  source 1..73: mol_type = other RNA
ggcggagaggagccctgtgacattcttcgacacgccccccatgctctttgtgttcattgccctggggcggtgg

SEQ ID NO: 9459 - RNA, 73 nt, synthetic construct
  source 1..73: mol_type = other RNA
ggcggagaggagccctgtgacattcttcgacacgccccccatgctctttgtgttcattgccctggggagatgg

SEQ ID NO: 9460 - RNA, 73 nt, synthetic construct
  source 1..73: mol_type = other RNA
ggcggagaggagccctgtgacattcttcgacacgccccccatgctctttgtgttcattgccctgggccggtgg

SEQ ID NO: 9461 - RNA, 73 nt, synthetic construct
  source 1..73: mol_type = other RNA
ggcggagaggagccctgtgacattcttcgacacgccccccatgctctttgtgttcattgccctgggtagatgg

SEQ ID NO: 9462 - RNA, 73 nt, synthetic construct
  source 1..73: mol_type = other RNA
ggcggagaggagccctgtgacattcttcgacacgccccccatgctctttgtgttcattgccctgggcaggtgg

SEQ ID NO: 9463 - RNA, 73 nt, synthetic construct
  source 1..73: mol_type = other RNA
ggcggagaggagccctgtgacattcttcgacacgccccccatgctctttgtgttcattgccctgggaaggtgg

SEQ ID NO: 9464 - RNA, 73 nt, synthetic construct
  source 1..73: mol_type = other RNA
ggcggagaggagccctgtgacattcttcgacacgccccccatgctctttgtgttcattgccctgggtcggtgg

SEQ ID NO: 9465 - RNA, 73 nt, synthetic construct
  source 1..73: mol_type = other RNA
ggcggagaggagccctgtgacattcttcgacacgccccccatgctctttgtgttcattgccctgggaagatgg

SEQ ID NO: 9466 - RNA, 73 nt, synthetic construct
  source 1..73: mol_type = other RNA
ggcggagaggagccctgtgacattcttcgacacgccccccatgctctttgtgttcattgccctggggaggtgg

SEQ ID NO: 9467 - RNA, 74 nt, synthetic construct
  source 1..74: mol_type = other RNA
aggcggagaggagccctgtgacattcttcgacacgccccccatgctctttgtgttcattgccctgggccggtgg

SEQ ID NO: 9468 - RNA, 74 nt, synthetic construct
  source 1..74: mol_type = other RNA
aggcggagaggagccctgtgacattcttcgacacgccccccatgctctttgtgttcattgccctgggaaggtgg

SEQ ID NO: 9469 - RNA, 74 nt, synthetic construct
  source 1..74: mol_type = other RNA
aggcggagaggagccctgtgacattcttcgacacgccccccatgctctttgtgttcattgccctgggaagatgg

SEQ ID NO: 9470 - RNA, 74 nt, synthetic construct
  source 1..74: mol_type = other RNA
aggcggagaggagccctgtgacattcttcgacacgccccccatgctctttgtgttcattgccctgggtagatgg

SEQ ID NO: 9471 - RNA, 74 nt, synthetic construct
  source 1..74: mol_type = other RNA
aggcggagaggagccctgtgacattcttcgacacgccccccatgctctttgtgttcattgccctgggcagatgg

SEQ ID NO: 9472 - RNA, 74 nt, synthetic construct
  source 1..74: mol_type = other RNA
aggcggagaggagccctgtgacattcttcgacacgccccccatgctctttgtgttcattgccctggggcggtgg

SEQ ID NO: 9473 - RNA, 74 nt, synthetic construct
  source 1..74: mol_type = other RNA
aggcggagaggagccctgtgacattcttcgacacgccccccatgctctttgtgttcattgccctgggcaggtgg

SEQ ID NO: 9474 - RNA, 74 nt, synthetic construct
  source 1..74: mol_type = other RNA
aggcggagaggagccctgtgacattcttcgacacgccccccatgctctttgtgttcattgccctgggtaggtgg

SEQ ID NO: 9475 - RNA, 74 nt, synthetic construct
  source 1..74: mol_type = other RNA
aggcggagaggagccctgtgacattcttcgacacgccccccatgctctttgtgttcattgccctgggacggtgg

SEQ ID NO: 9476 - RNA, 74 nt, synthetic construct
  source 1..74: mol_type = other RNA
aggcggagaggagccctgtgacattcttcgacacgccccccatgctctttgtgttcattgccctggggaggtgg

SEQ ID NO: 9477 - RNA, 74 nt, synthetic construct
  source 1..74: mol_type = other RNA
aggcggagaggagccctgtgacattcttcgacacgccccccatgctctttgtgttcattgccctgggtcggtgg

SEQ ID NO: 9478 - RNA, 74 nt, synthetic construct
  source 1..74: mol_type = other RNA
aggcggagaggagccctgtgacattcttcgacacgccccccatgctctttgtgttcattgccctggggagatgg

SEQ ID NO: 9479 - RNA, 75 nt, synthetic construct
  source 1..75: mol_type = other RNA
aaggcggagaggagccctgtgacattcttcgacacgccccccatgctctttgtgttcattgccctggggaggtgg

SEQ ID NO: 9480 - RNA, 75 nt, synthetic construct
  source 1..75: mol_type = other RNA
aaggcggagaggagccctgtgacattcttcgacacgccccccatgctctttgtgttcattgccctgggtagatgg

SEQ ID NO: 9481 - RNA, 75 nt, synthetic construct
  source 1..75: mol_type = other RNA
aaggcggagaggagccctgtgacattcttcgacacgccccccatgctctttgtgttcattgccctgggaagatgg

SEQ ID NO: 9482 - RNA, 75 nt, synthetic construct
  source 1..75: mol_type = other RNA
aaggcggagaggagccctgtgacattcttcgacacgccccccatgctctttgtgttcattgccctggggagatgg

SEQ ID NO: 9483 - RNA, 75 nt, synthetic construct
  source 1..75: mol_type = other RNA
aaggcggagaggagccctgtgacattcttcgacacgccccccatgctctttgtgttcattgccctgggcaggtgg

SEQ ID NO: 9484 - RNA, 75 nt, synthetic construct
  source 1..75: mol_type = other RNA
aaggcggagaggagccctgtgacattcttcgacacgccccccatgctctttgtgttcattgccctgggacggtgg

SEQ ID NO: 9485 - RNA, 75 nt, synthetic construct
  source 1..75: mol_type = other RNA
aaggcggagaggagccctgtgacattcttcgacacgccccccatgctctttgtgttcattgccctgggccggtgg

SEQ ID NO: 9486 - RNA, 75 nt, synthetic construct
  source 1..75: mol_type = other RNA
aaggcggagaggagccctgtgacattcttcgacacgccccccatgctctttgtgttcattgccctgggtaggtgg

SEQ ID NO: 9487 - RNA, 75 nt, synthetic construct
  source 1..75: mol_type = other RNA
aaggcggagaggagccctgtgacattcttcgacacgccccccatgctctttgtgttcattgccctgggtcggtgg

SEQ ID NO: 9488 - RNA, 75 nt, synthetic construct
  source 1..75: mol_type = other RNA
aaggcggagaggagccctgtgacattcttcgacacgccccccatgctctttgtgttcattgccctggggcggtgg

SEQ ID NO: 9489 - RNA, 75 nt, synthetic construct
  source 1..75: mol_type = other RNA
aaggcggagaggagccctgtgacattcttcgacacgccccccatgctctttgtgttcattgccctgggcagatgg

SEQ ID NO: 9490 - RNA, 75 nt, synthetic construct
  source 1..75: mol_type = other RNA
aaggcggagaggagccctgtgacattcttcgacacgccccccatgctctttgtgttcattgccctgggaaggtgg

SEQ ID NO: 9491 - RNA, 76 nt, synthetic construct
  source 1..76: mol_type = other RNA
gaaggcggagaggagccctgtgacattcttcgacacgccccccatgctctttgtgttcattgccctgggaagatgg

SEQ ID NO: 9492 - RNA, 76 nt, synthetic construct
  source 1..76: mol_type = other RNA
gaaggcggagaggagccctgtgacattcttcgacacgccccccatgctctttgtgttcattgccctgggacggtgg

SEQ ID NO: 9493 - RNA, 76 nt, synthetic construct
  source 1..76: mol_type = other RNA
gaaggcggagaggagccctgtgacattcttcgacacgccccccatgctctttgtgttcattgccctgggtagatgg

SEQ ID NO: 9494 - RNA, 76 nt, synthetic construct
  source 1..76: mol_type = other RNA
gaaggcggagaggagccctgtgacattcttcgacacgccccccatgctctttgtgttcattgccctgggcagatgg

SEQ ID NO: 9495 - RNA, 76 nt, synthetic construct
  source 1..76: mol_type = other RNA
gaaggcggagaggagccctgtgacattcttcgacacgccccccatgctctttgtgttcattgccctggggcggtgg

SEQ ID NO: 9496 - RNA, 76 nt, synthetic construct
  source 1..76: mol_type = other RNA
gaaggcggagaggagccctgtgacattcttcgacacgccccccatgctctttgtgttcattgccctgggccggtgg

SEQ ID NO: 9497 - RNA, 76 nt, synthetic construct
  source 1..76: mol_type = other RNA
gaaggcggagaggagccctgtgacattcttcgacacgccccccatgctctttgtgttcattgccctggggagatgg

SEQ ID NO: 9498 - RNA, 76 nt, synthetic construct
  source 1..76: mol_type = other RNA
gaaggcggagaggagccctgtgacattcttcgacacgccccccatgctctttgtgttcattgccctgggtcggtgg

SEQ ID NO: 9499 - RNA, 76 nt, synthetic construct
  source 1..76: mol_type = other RNA
gaaggcggagaggagccctgtgacattcttcgacacgccccccatgctctttgtgttcattgccctggggaggtgg

SEQ ID NO: 9500 - RNA, 76 nt, synthetic construct
  source 1..76: mol_type = other RNA
gaaggcggagaggagccctgtgacattcttcgacacgccccccatgctctttgtgttcattgccctgggcaggtgg

SEQ ID NO: 9501 - RNA, 76 nt, synthetic construct
  source 1..76: mol_type = other RNA
gaaggcggagaggagccctgtgacattcttcgacacgccccccatgctctttgtgttcattgccctgggaaggtgg

SEQ ID NO: 9502 - RNA, 76 nt, synthetic construct
  source 1..76: mol_type = other RNA
gaaggcggagaggagccctgtgacattcttcgacacgccccccatgctctttgtgttcattgccctgggtaggtgg

SEQ ID NO: 9503 - RNA, 77 nt, synthetic construct
  source 1..77: mol_type = other RNA
agaaggcggagaggagccctgtgacattcttcgacacgccccccatgctctttgtgttcattgccctgggtagatgg

SEQ ID NO: 9504 - RNA, 77 nt, synthetic construct
  source 1..77: mol_type = other RNA
agaaggcggagaggagccctgtgacattcttcgacacgccccccatgctctttgtgttcattgccctggggagatgg

SEQ ID NO: 9505 - RNA, 77 nt, synthetic construct
  source 1..77: mol_type = other RNA
agaaggcggagaggagccctgtgacattcttcgacacgccccccatgctctttgtgttcattgccctgggaaggtgg

SEQ ID NO: 9506 - RNA, 77 nt, synthetic construct
  source 1..77: mol_type = other RNA
agaaggcggagaggagccctgtgacattcttcgacacgccccccatgctctttgtgttcattgccctgggccggtgg

SEQ ID NO: 9507 - RNA, 77 nt, synthetic construct
  source 1..77: mol_type = other RNA
agaaggcggagaggagccctgtgacattcttcgacacgccccccatgctctttgtgttcattgccctgggtaggtgg

SEQ ID NO: 9508 - RNA, 77 nt, synthetic construct
  source 1..77: mol_type = other RNA
agaaggcggagaggagccctgtgacattcttcgacacgccccccatgctctttgtgttcattgccctgggcaggtgg

SEQ ID NO: 9509 - RNA, 77 nt, synthetic construct
  source 1..77: mol_type = other RNA
agaaggcggagaggagccctgtgacattcttcgacacgccccccatgctctttgtgttcattgccctgggcagatgg

SEQ ID NO: 9510 - RNA, 77 nt, synthetic construct
  source 1..77: mol_type = other RNA
agaaggcggagaggagccctgtgacattcttcgacacgccccccatgctctttgtgttcattgccctggggcggtgg

SEQ ID NO: 9511 - RNA, 77 nt, synthetic construct
  source 1..77: mol_type = other RNA
agaaggcggagaggagccctgtgacattcttcgacacgccccccatgctctttgtgttcattgccctgggacggtgg

SEQ ID NO: 9512 - RNA, 77 nt, synthetic construct
  source 1..77: mol_type = other RNA
agaaggcggagaggagccctgtgacattcttcgacacgccccccatgctctttgtgttcattgccctggggaggtgg

SEQ ID NO: 9513 - RNA, 77 nt, synthetic construct
  source 1..77: mol_type = other RNA
agaaggcggagaggagccctgtgacattcttcgacacgccccccatgctctttgtgttcattgccctgggaagatgg

SEQ ID NO: 9514 - RNA, 77 nt, synthetic construct
  source 1..77: mol_type = other RNA
agaaggcggagaggagccctgtgacattcttcgacacgccccccatgctctttgtgttcattgccctgggtcggtgg

SEQ ID NO: 9515 - RNA, 78 nt, synthetic construct
  source 1..78: mol_type = other RNA
gagaaggcggagaggagccctgtgacattcttcgacacgccccccatgctctttgtgttcattgccctgggtaggtgg

SEQ ID NO: 9516 - RNA, 78 nt, synthetic construct
  source 1..78: mol_type = other RNA
gagaaggcggagaggagccctgtgacattcttcgacacgccccccatgctctttgtgttcattgccctgggtcggtgg

SEQ ID NO: 9517 - RNA, 78 nt, synthetic construct
  source 1..78: mol_type = other RNA
gagaaggcggagaggagccctgtgacattcttcgacacgccccccatgctctttgtgttcattgccctgggcaggtgg

SEQ ID NO: 9518 - RNA, 78 nt, synthetic construct
  source 1..78: mol_type = other RNA
gagaaggcggagaggagccctgtgacattcttcgacacgccccccatgctctttgtgttcattgccctggggaggtgg

SEQ ID NO: 9519 - RNA, 78 nt, synthetic construct
  source 1..78: mol_type = other RNA
gagaaggcggagaggagccctgtgacattcttcgacacgccccccatgctctttgtgttcattgccctgggccggtgg

SEQ ID NO: 9520 - RNA, 78 nt, synthetic construct
  source 1..78: mol_type = other RNA
gagaaggcggagaggagccctgtgacattcttcgacacgccccccatgctctttgtgttcattgccctgggaagatgg

SEQ ID NO: 9521 - RNA, 78 nt, synthetic construct
  source 1..78: mol_type = other RNA
gagaaggcggagaggagccctgtgacattcttcgacacgccccccatgctctttgtgttcattgccctgggaaggtgg

SEQ ID NO: 9522 - RNA, 78 nt, synthetic construct
  source 1..78: mol_type = other RNA
gagaaggcggagaggagccctgtgacattcttcgacacgccccccatgctctttgtgttcattgccctggggagatgg

SEQ ID NO: 9523 - RNA, 78 nt, synthetic construct
  source 1..78: mol_type = other RNA
gagaaggcggagaggagccctgtgacattcttcgacacgccccccatgctctttgtgttcattgccctgggtagatgg

SEQ ID NO: 9524 - RNA, 78 nt, synthetic construct
  source 1..78: mol_type = other RNA
gagaaggcggagaggagccctgtgacattcttcgacacgccccccatgctctttgtgttcattgccctgggcagatgg

SEQ ID NO: 9525 - RNA, 78 nt, synthetic construct
  source 1..78: mol_type = other RNA
gagaaggcggagaggagccctgtgacattcttcgacacgccccccatgctctttgtgttcattgccctggggcggtgg

SEQ ID NO: 9526 - RNA, 78 nt, synthetic construct
  source 1..78: mol_type = other RNA
gagaaggcggagaggagccctgtgacattcttcgacacgccccccatgctctttgtgttcattgccctgggacggtgg

SEQ ID NO: 9527 - RNA, 79 nt, synthetic construct
  source 1..79: mol_type = other RNA
tgagaaggcggagaggagccctgtgacattcttcgacacgccccccatgctctttgtgttcattgccctgggtcggtgg

SEQ ID NO: 9528 - RNA, 79 nt, synthetic construct
  source 1..79: mol_type = other RNA
tgagaaggcggagaggagccctgtgacattcttcgacacgccccccatgctctttgtgttcattgccctggggaggtgg

SEQ ID NO: 9529 - RNA, 79 nt, synthetic construct
  source 1..79: mol_type = other RNA
tgagaaggcggagaggagccctgtgacattcttcgacacgccccccatgctctttgtgttcattgccctggggcggtgg

SEQ ID NO: 9530 - RNA, 79 nt, synthetic construct
  source 1..79: mol_type = other RNA
tgagaaggcggagaggagccctgtgacattcttcgacacgccccccatgctctttgtgttcattgccctgggaagatgg

SEQ ID NO: 9531 - RNA, 79 nt, synthetic construct
  source 1..79: mol_type = other RNA
tgagaaggcggagaggagccctgtgacattcttcgacacgccccccatgctctttgtgttcattgccctggggagatgg

SEQ ID NO: 9532 - RNA, 79 nt, synthetic construct
  source 1..79: mol_type = other RNA
tgagaaggcggagaggagccctgtgacattcttcgacacgccccccatgctctttgtgttcattgccctgggcagatgg

SEQ ID NO: 9533 - RNA, 79 nt, synthetic construct
  source 1..79: mol_type = other RNA
tgagaaggcggagaggagccctgtgacattcttcgacacgccccccatgctctttgtgttcattgccctgggacggtgg

SEQ ID NO: 9534 - RNA, 79 nt, synthetic construct
  source 1..79: mol_type = other RNA
tgagaaggcggagaggagccctgtgacattcttcgacacgccccccatgctctttgtgttcattgccctgggtaggtgg

SEQ ID NO: 9535 - RNA, 79 nt, synthetic construct
  source 1..79: mol_type = other RNA
tgagaaggcggagaggagccctgtgacattcttcgacacgccccccatgctctttgtgttcattgccctgggcaggtgg

SEQ ID NO: 9536 - RNA, 79 nt, synthetic construct
  source 1..79: mol_type = other RNA
tgagaaggcggagaggagccctgtgacattcttcgacacgccccccatgctctttgtgttcattgccctgggaaggtgg

SEQ ID NO: 9537 - RNA, 79 nt, synthetic construct
  source 1..79: mol_type = other RNA
tgagaaggcggagaggagccctgtgacattcttcgacacgccccccatgctctttgtgttcattgccctgggtagatgg

SEQ ID NO: 9538 - RNA, 79 nt, synthetic construct
  source 1..79: mol_type = other RNA
tgagaaggcggagaggagccctgtgacattcttcgacacgccccccatgctctttgtgttcattgccctgggccggtgg

SEQ ID NO: 9539 - RNA, 80 nt, synthetic construct
  source 1..80: mol_type = other RNA
ctgagaaggcggagaggagccctgtgacattcttcgacacgccccccatgctctttgtgttcattgccctgggtcggtgg

SEQ ID NO: 9540 - RNA, 80 nt, synthetic construct
  source 1..80: mol_type = other RNA
ctgagaaggcggagaggagccctgtgacattcttcgacacgccccccatgctctttgtgttcattgccctgggtagatgg

SEQ ID NO: 9541 - RNA, 80 nt, synthetic construct
  source 1..80: mol_type = other RNA
ctgagaaggcggagaggagccctgtgacattcttcgacacgccccccatgctctttgtgttcattgccctgggcagatgg

SEQ ID NO: 9542 - RNA, 80 nt, synthetic construct
  source 1..80: mol_type = other RNA
ctgagaaggcggagaggagccctgtgacattcttcgacacgccccccatgctctttgtgttcattgccctggggcggtgg

SEQ ID NO: 9543 - RNA, 80 nt, synthetic construct
  source 1..80: mol_type = other RNA
ctgagaaggcggagaggagccctgtgacattcttcgacacgccccccatgctctttgtgttcattgccctggggagatgg

SEQ ID NO: 9544 - RNA, 80 nt, synthetic construct
  source 1..80: mol_type = other RNA
ctgagaaggcggagaggagccctgtgacattcttcgacacgccccccatgctctttgtgttcattgccctgggaaggtgg

SEQ ID NO: 9545 - RNA, 80 nt, synthetic construct
  source 1..80: mol_type = other RNA
ctgagaaggcggagaggagccctgtgacattcttcgacacgccccccatgctctttgtgttcattgccctgggcaggtgg

SEQ ID NO: 9546 - RNA, 80 nt, synthetic construct
  source 1..80: mol_type = other RNA
ctgagaaggcggagaggagccctgtgacattcttcgacacgccccccatgctctttgtgttcattgccctgggccggtgg

SEQ ID NO: 9547 - RNA, 80 nt, synthetic construct
  source 1..80: mol_type = other RNA
ctgagaaggcggagaggagccctgtgacattcttcgacacgccccccatgctctttgtgttcattgccctggggaggtgg

SEQ ID NO: 9548 - RNA, 80 nt, synthetic construct
  source 1..80: mol_type = other RNA
ctgagaaggcggagaggagccctgtgacattcttcgacacgccccccatgctctttgtgttcattgccctgggtaggtgg

SEQ ID NO: 9549 - RNA, 80 nt, synthetic construct
  source 1..80: mol_type = other RNA
ctgagaaggcggagaggagccctgtgacattcttcgacacgccccccatgctctttgtgttcattgccctgggaagatgg

SEQ ID NO: 9550 - RNA, 80 nt, synthetic construct
  source 1..80: mol_type = other RNA
ctgagaaggcggagaggagccctgtgacattcttcgacacgccccccatgctctttgtgttcattgccctgggacggtgg

SEQ ID NO: 9551 - RNA, 81 nt, synthetic construct
  source 1..81: mol_type = other RNA
gctgagaaggcggagaggagccctgtgacattcttcgacacgccccccatgctctttgtgttcattgccctgggacggtgg

SEQ ID NO: 9552 - RNA, 81 nt, synthetic construct
  source 1..81: mol_type = other RNA
gctgagaaggcggagaggagccctgtgacattcttcgacacgccccccatgctctttgtgttcattgccctgggaagatgg

SEQ ID NO: 9553 - RNA, 81 nt, synthetic construct
  source 1..81: mol_type = other RNA
gctgagaaggcggagaggagccctgtgacattcttcgacacgccccccatgctctttgtgttcattgccctgggtcggtgg

SEQ ID NO: 9554 - RNA, 81 nt, synthetic construct
  source 1..81: mol_type = other RNA
gctgagaaggcggagaggagccctgtgacattcttcgacacgccccccatgctctttgtgttcattgccctgggtaggtgg

SEQ ID NO: 9555 - RNA, 81 nt, synthetic construct
  source 1..81: mol_type = other RNA
gctgagaaggcggagaggagccctgtgacattcttcgacacgccccccatgctctttgtgttcattgccctggggaggtgg

SEQ ID NO: 9556 - RNA, 81 nt, synthetic construct
  source 1..81: mol_type = other RNA
gctgagaaggcggagaggagccctgtgacattcttcgacacgccccccatgctctttgtgttcattgccctgggtagatgg

SEQ ID NO: 9557 - RNA, 81 nt, synthetic construct
  source 1..81: mol_type = other RNA
gctgagaaggcggagaggagccctgtgacattcttcgacacgccccccatgctctttgtgttcattgccctggggcggtgg

SEQ ID NO: 9558 - RNA, 81 nt, synthetic construct
  source 1..81: mol_type = other RNA
gctgagaaggcggagaggagccctgtgacattcttcgacacgccccccatgctctttgtgttcattgccctgggcagatgg

SEQ ID NO: 9559 - RNA, 81 nt, synthetic construct
  source 1..81: mol_type = other RNA
gctgagaaggcggagaggagccctgtgacattcttcgacacgccccccatgctctttgtgttcattgccctggggagatgg

SEQ ID NO: 9560 - RNA, 81 nt, synthetic construct
  source 1..81: mol_type = other RNA
gctgagaaggcggagaggagccctgtgacattcttcgacacgccccccatgctctttgtgttcattgccctgggcaggtgg

SEQ ID NO: 9561 - RNA, 81 nt, synthetic construct
  source 1..81: mol_type = other RNA
gctgagaaggcggagaggagccctgtgacattcttcgacacgccccccatgctctttgtgttcattgccctgggaaggtgg

SEQ ID NO: 9562 - RNA, 81 nt, synthetic construct
  source 1..81: mol_type = other RNA
gctgagaaggcggagaggagccctgtgacattcttcgacacgccccccatgctctttgtgttcattgccctgggccggtgg

SEQ ID NO: 9563 - RNA, 82 nt, synthetic construct
  source 1..82: mol_type = other RNA
ggctgagaaggcggagaggagccctgtgacattcttcgacacgccccccatgctctttgtgttcattgccctgggccggtgg

SEQ ID NO: 9564 - RNA, 82 nt, synthetic construct
  source 1..82: mol_type = other RNA
ggctgagaaggcggagaggagccctgtgacattcttcgacacgccccccatgctctttgtgttcattgccctgggtagatgg

SEQ ID NO: 9565 - RNA, 82 nt, synthetic construct
  source 1..82: mol_type = other RNA
ggctgagaaggcggagaggagccctgtgacattcttcgacacgccccccatgctctttgtgttcattgccctgggaagatgg

SEQ ID NO: 9566 - RNA, 82 nt, synthetic construct
  source 1..82: mol_type = other RNA
ggctgagaaggcggagaggagccctgtgacattcttcgacacgccccccatgctctttgtgttcattgccctgggcagatgg

SEQ ID NO: 9567 - RNA, 82 nt, synthetic construct
  source 1..82: mol_type = other RNA
ggctgagaaggcggagaggagccctgtgacattcttcgacacgccccccatgctctttgtgttcattgccctgggaaggtgg

SEQ ID NO: 9568 - RNA, 82 nt, synthetic construct
  source 1..82: mol_type = other RNA
ggctgagaaggcggagaggagccctgtgacattcttcgacacgccccccatgctctttgtgttcattgccctgggacggtgg

SEQ ID NO: 9569 - RNA, 82 nt, synthetic construct
  source 1..82: mol_type = other RNA
ggctgagaaggcggagaggagccctgtgacattcttcgacacgccccccatgctctttgtgttcattgccctggggcggtgg

SEQ ID NO: 9570 - RNA, 82 nt, synthetic construct
  source 1..82: mol_type = other RNA
ggctgagaaggcggagaggagccctgtgacattcttcgacacgccccccatgctctttgtgttcattgccctggggaggtgg

SEQ ID NO: 9571 - RNA, 82 nt, synthetic construct
  source 1..82: mol_type = other RNA
ggctgagaaggcggagaggagccctgtgacattcttcgacacgccccccatgctctttgtgttcattgccctgggcaggtgg

SEQ ID NO: 9572 - RNA, 82 nt, synthetic construct
  source 1..82: mol_type = other RNA
ggctgagaaggcggagaggagccctgtgacattcttcgacacgccccccatgctctttgtgttcattgccctgggtcggtgg

SEQ ID NO: 9573 - RNA, 82 nt, synthetic construct
  source 1..82: mol_type = other RNA
ggctgagaaggcggagaggagccctgtgacattcttcgacacgccccccatgctctttgtgttcattgccctggggagatgg

SEQ ID NO: 9574 - RNA, 82 nt, synthetic construct
  source 1..82: mol_type = other RNA
ggctgagaaggcggagaggagccctgtgacattcttcgacacgccccccatgctctttgtgttcattgccctgggtaggtgg

SEQ ID NO: 9575 - RNA, 83 nt, synthetic construct
  source 1..83: mol_type = other RNA
tggctgagaaggcggagaggagccctgtgacattcttcgacacgccccccatgctctttgtgttcattgccctggggcggtgg

SEQ ID NO: 9576 - RNA, 83 nt, synthetic construct
  source 1..83: mol_type = other RNA
tggctgagaaggcggagaggagccctgtgacattcttcgacacgccccccatgctctttgtgttcattgccctgggccggtgg

SEQ ID NO: 9577 - RNA, 83 nt, synthetic construct
  source 1..83: mol_type = other RNA
tggctgagaaggcggagaggagccctgtgacattcttcgacacgccccccatgctctttgtgttcattgccctgggaaggtgg

SEQ ID NO: 9578 - RNA, 83 nt, synthetic construct
  source 1..83: mol_type = other RNA
tggctgagaaggcggagaggagccctgtgacattcttcgacacgccccccatgctctttgtgttcattgccctgggtcggtgg

SEQ ID NO: 9579 - RNA, 83 nt, synthetic construct
  source 1..83: mol_type = other RNA
tggctgagaaggcggagaggagccctgtgacattcttcgacacgccccccatgctctttgtgttcattgccctggggaggtgg

SEQ ID NO: 9580 - RNA, 83 nt, synthetic construct
  source 1..83: mol_type = other RNA
tggctgagaaggcggagaggagccctgtgacattcttcgacacgccccccatgctctttgtgttcattgccctgggacggtgg

SEQ ID NO: 9581 - RNA, 83 nt, synthetic construct
  source 1..83: mol_type = other RNA
tggctgagaaggcggagaggagccctgtgacattcttcgacacgccccccatgctctttgtgttcattgccctggggagatgg

SEQ ID NO: 9582 - RNA, 83 nt, synthetic construct
  source 1..83: mol_type = other RNA
tggctgagaaggcggagaggagccctgtgacattcttcgacacgccccccatgctctttgtgttcattgccctgggtagatgg

SEQ ID NO: 9583 - RNA, 83 nt, synthetic construct
  source 1..83: mol_type = other RNA
tggctgagaaggcggagaggagccctgtgacattcttcgacacgccccccatgctctttgtgttcattgccctgggtaggtgg

SEQ ID NO: 9584 - RNA, 83 nt, synthetic construct
  source 1..83: mol_type = other RNA
tggctgagaaggcggagaggagccctgtgacattcttcgacacgccccccatgctctttgtgttcattgccctgggcaggtgg

SEQ ID NO: 9585 - RNA, 83 nt, synthetic construct
  source 1..83: mol_type = other RNA
tggctgagaaggcggagaggagccctgtgacattcttcgacacgccccccatgctctttgtgttcattgccctgggcagatgg

SEQ ID NO: 9586 - RNA, 83 nt, synthetic construct
  source 1..83: mol_type = other RNA
tggctgagaaggcggagaggagccctgtgacattcttcgacacgccccccatgctctttgtgttcattgccctgggaagatgg

SEQ ID NO: 9587 - RNA, 84 nt, synthetic construct
  source 1..84: mol_type = other RNA
gtggctgagaaggcggagaggagccctgtgacattcttcgacacgccccccatgctctttgtgttcattgccctgggcagatgg

SEQ ID NO: 9588 - RNA, 84 nt, synthetic construct
  source 1..84: mol_type = other RNA
gtggctgagaaggcggagaggagccctgtgacattcttcgacacgccccccatgctctttgtgttcattgccctgggtagatgg

SEQ ID NO: 9589 - RNA, 84 nt, synthetic construct
  source 1..84: mol_type = other RNA
gtggctgagaaggcggagaggagccctgtgacattcttcgacacgccccccatgctctttgtgttcattgccctgggcaggtgg

SEQ ID NO: 9590 - RNA, 84 nt, synthetic construct
  source 1..84: mol_type = other RNA
gtggctgagaaggcggagaggagccctgtgacattcttcgacacgccccccatgctctttgtgttcattgccctggggaggtgg

SEQ ID NO: 9591 - RNA, 84 nt, synthetic construct
  source 1..84: mol_type = other RNA
gtggctgagaaggcggagaggagccctgtgacattcttcgacacgccccccatgctctttgtgttcattgccctggggagatgg

SEQ ID NO: 9592 - RNA, 84 nt, synthetic construct
  source 1..84: mol_type = other RNA
gtggctgagaaggcggagaggagccctgtgacattcttcgacacgccccccatgctctttgtgttcattgccctggggcggtgg

SEQ ID NO: 9593 - RNA, 84 nt, synthetic construct
  source 1..84: mol_type = other RNA
gtggctgagaaggcggagaggagccctgtgacattcttcgacacgccccccatgctctttgtgttcattgccctgggccggtgg

SEQ ID NO: 9594 - RNA, 84 nt, synthetic construct
  source 1..84: mol_type = other RNA
gtggctgagaaggcggagaggagccctgtgacattcttcgacacgccccccatgctctttgtgttcattgccctgggtcggtgg

SEQ ID NO: 9595 - RNA, 84 nt, synthetic construct
  source 1..84: mol_type = other RNA
gtggctgagaaggcggagaggagccctgtgacattcttcgacacgccccccatgctctttgtgttcattgccctgggacggtgg

SEQ ID NO: 9596 - RNA, 84 nt, synthetic construct
  source 1..84: mol_type = other RNA
gtggctgagaaggcggagaggagccctgtgacattcttcgacacgccccccatgctctttgtgttcattgccctgggtaggtgg

SEQ ID NO: 9597 - RNA, 84 nt, synthetic construct
  source 1..84: mol_type = other RNA
gtggctgagaaggcggagaggagccctgtgacattcttcgacacgccccccatgctctttgtgttcattgccctgggaaggtgg

SEQ ID NO: 9598 - RNA, 84 nt, synthetic construct
  source 1..84: mol_type = other RNA
gtggctgagaaggcggagaggagccctgtgacattcttcgacacgccccccatgctctttgtgttcattgccctgggaagatgg

SEQ ID NO: 9599 - RNA, 85 nt, synthetic construct
  source 1..85: mol_type = other RNA
tgtggctgagaaggcggagaggagccctgtgacattcttcgacacgccccccatgctctttgtgttcattgccctgggcaggtgg

SEQ ID NO: 9600 - RNA, 85 nt, synthetic construct
  source 1..85: mol_type = other RNA
tgtggctgagaaggcggagaggagccctgtgacattcttcgacacgccccccatgctctttgtgttcattgccctggggcggtgg

SEQ ID NO: 9601 - RNA, 85 nt, synthetic construct
  source 1..85: mol_type = other RNA
tgtggctgagaaggcggagaggagccctgtgacattcttcgacacgccccccatgctctttgtgttcattgccctgggaagatgg

SEQ ID NO: 9602 - RNA, 85 nt, synthetic construct
  source 1..85: mol_type = other RNA
tgtggctgagaaggcggagaggagccctgtgacattcttcgacacgccccccatgctctttgtgttcattgccctgggtcggtgg

SEQ ID NO: 9603 - RNA, 85 nt, synthetic construct
  source 1..85: mol_type = other RNA
tgtggctgagaaggcggagaggagccctgtgacattcttcgacacgccccccatgctctttgtgttcattgccctgggtaggtgg

SEQ ID NO: 9604 - RNA, 85 nt, synthetic construct
  source 1..85: mol_type = other RNA
tgtggctgagaaggcggagaggagccctgtgacattcttcgacacgccccccatgctctttgtgttcattgccctgggccggtgg

SEQ ID NO: 9605 - RNA, 85 nt, synthetic construct
  source 1..85: mol_type = other RNA
tgtggctgagaaggcggagaggagccctgtgacattcttcgacacgccccccatgctctttgtgttcattgccctggggaggtgg

SEQ ID NO: 9606 - RNA, 85 nt, synthetic construct
  source 1..85: mol_type = other RNA
tgtggctgagaaggcggagaggagccctgtgacattcttcgacacgccccccatgctctttgtgttcattgccctgggaaggtgg

SEQ ID NO: 9607 - RNA, 85 nt, synthetic construct
  source 1..85: mol_type = other RNA
tgtggctgagaaggcggagaggagccctgtgacattcttcgacacgccccccatgctctttgtgttcattgccctggggagatgg

SEQ ID NO: 9608 - RNA, 85 nt, synthetic construct
  source 1..85: mol_type = other RNA
tgtggctgagaaggcggagaggagccctgtgacattcttcgacacgccccccatgctctttgtgttcattgccctgggcagatgg

SEQ ID NO: 9609 - RNA, 85 nt, synthetic construct
  source 1..85: mol_type = other RNA
tgtggctgagaaggcggagaggagccctgtgacattcttcgacacgccccccatgctctttgtgttcattgccctgggacggtgg

SEQ ID NO: 9610 - RNA, 85 nt, synthetic construct
  source 1..85: mol_type = other RNA
tgtggctgagaaggcggagaggagccctgtgacattcttcgacacgccccccatgctctttgtgttcattgccctgggtagatgg

SEQ ID NO: 9611 - RNA, 86 nt, synthetic construct
  source 1..86: mol_type = other RNA
ctgtggctgagaaggcggagaggagccctgtgacattcttcgacacgccccccatgctctttgtgttcattgccctgggccggtgg

SEQ ID NO: 9612 - RNA, 86 nt, synthetic construct
  source 1..86: mol_type = other RNA
ctgtggctgagaaggcggagaggagccctgtgacattcttcgacacgccccccatgctctttgtgttcattgccctgggacggtgg

SEQ ID NO: 9613 - RNA, 86 nt, synthetic construct
  source 1..86: mol_type = other RNA
ctgtggctgagaaggcggagaggagccctgtgacattcttcgacacgccccccatgctctttgtgttcattgccctgggaagatgg

SEQ ID NO: 9614 - RNA, 86 nt, synthetic construct
  source 1..86: mol_type = other RNA
ctgtggctgagaaggcggagaggagccctgtgacattcttcgacacgccccccatgctctttgtgttcattgccctgggaaggtgg

SEQ ID NO: 9615 - RNA, 86 nt, synthetic construct
  source 1..86: mol_type = other RNA
ctgtggctgagaaggcggagaggagccctgtgacattcttcgacacgccccccatgctctttgtgttcattgccctgggcagatgg

SEQ ID NO: 9616 - RNA, 86 nt, synthetic construct
  source 1..86: mol_type = other RNA
ctgtggctgagaaggcggagaggagccctgtgacattcttcgacacgccccccatgctctttgtgttcattgccctggggagatgg

SEQ ID NO: 9617 - RNA, 86 nt, synthetic construct
  source 1..86: mol_type = other RNA
ctgtggctgagaaggcggagaggagccctgtgacattcttcgacacgccccccatgctctttgtgttcattgccctgggtaggtgg

SEQ ID NO: 9618 - RNA, 86 nt, synthetic construct
  source 1..86: mol_type = other RNA
ctgtggctgagaaggcggagaggagccctgtgacattcttcgacacgccccccatgctctttgtgttcattgccctgggtagatgg

SEQ ID NO: 9619 - RNA, 86 nt, synthetic construct
  source 1..86: mol_type = other RNA
ctgtggctgagaaggcggagaggagccctgtgacattcttcgacacgccccccatgctctttgtgttcattgccctgggcaggtgg

SEQ ID NO: 9620 - RNA, 86 nt, synthetic construct
  source 1..86: mol_type = other RNA
ctgtggctgagaaggcggagaggagccctgtgacattcttcgacacgccccccatgctctttgtgttcattgccctggggaggtgg

SEQ ID NO: 9621 - RNA, 86 nt, synthetic construct
  source 1..86: mol_type = other RNA
ctgtggctgagaaggcggagaggagccctgtgacattcttcgacacgccccccatgctctttgtgttcattgccctgggtcggtgg

SEQ ID NO: 9622 - RNA, 86 nt, synthetic construct
  source 1..86: mol_type = other RNA
ctgtggctgagaaggcggagaggagccctgtgacattcttcgacacgccccccatgctctttgtgttcattgccctggggcggtgg

SEQ ID NO: 9623 - RNA, 87 nt, synthetic construct
  source 1..87: mol_type = other RNA
gctgtggctgagaaggcggagaggagccctgtgacattcttcgacacgccccccatgctctttgtgttcattgccctgggtagatgg

SEQ ID NO: 9624 - RNA, 87 nt, synthetic construct
  source 1..87: mol_type = other RNA
gctgtggctgagaaggcggagaggagccctgtgacattcttcgacacgccccccatgctctttgtgttcattgccctgggcagatgg

SEQ ID NO: 9625 - RNA, 87 nt, synthetic construct
  source 1..87: mol_type = other RNA
gctgtggctgagaaggcggagaggagccctgtgacattcttcgacacgccccccatgctctttgtgttcattgccctgggaagatgg

SEQ ID NO: 9626 - RNA, 87 nt, synthetic construct
  source 1..87: mol_type = other RNA
gctgtggctgagaaggcggagaggagccctgtgacattcttcgacacgccccccatgctctttgtgttcattgccctgggcaggtgg

SEQ ID NO: 9627 - RNA, 87 nt, synthetic construct
  source 1..87: mol_type = other RNA
gctgtggctgagaaggcggagaggagccctgtgacattcttcgacacgccccccatgctctttgtgttcattgccctgggacggtgg

SEQ ID NO: 9628 - RNA, 87 nt, synthetic construct
  source 1..87: mol_type = other RNA
gctgtggctgagaaggcggagaggagccctgtgacattcttcgacacgccccccatgctctttgtgttcattgccctgggtcggtgg

SEQ ID NO: 9629 - RNA, 87 nt, synthetic construct
  source 1..87: mol_type = other RNA
gctgtggctgagaaggcggagaggagccctgtgacattcttcgacacgccccccatgctctttgtgttcattgccctgggaaggtgg

SEQ ID NO: 9630 - RNA, 87 nt, synthetic construct
  source 1..87: mol_type = other RNA
gctgtggctgagaaggcggagaggagccctgtgacattcttcgacacgccccccatgctctttgtgttcattgccctggggagatgg

SEQ ID NO: 9631 - RNA, 87 nt, synthetic construct
  source 1..87: mol_type = other RNA
gctgtggctgagaaggcggagaggagccctgtgacattcttcgacacgccccccatgctctttgtgttcattgccctgggtaggtgg

SEQ ID NO: 9632 - RNA, 87 nt, synthetic construct
  source 1..87: mol_type = other RNA
gctgtggctgagaaggcggagaggagccctgtgacattcttcgacacgccccccatgctctttgtgttcattgccctgggccggtgg

SEQ ID NO: 9633 - RNA, 87 nt, synthetic construct
  source 1..87: mol_type = other RNA
gctgtggctgagaaggcggagaggagccctgtgacattcttcgacacgccccccatgctctttgtgttcattgccctggggaggtgg

SEQ ID NO: 9634 - RNA, 87 nt, synthetic construct
  source 1..87: mol_type = other RNA
gctgtggctgagaaggcggagaggagccctgtgacattcttcgacacgccccccatgctctttgtgttcattgccctggggcggtgg

SEQ ID NO: 9635 - RNA, 88 nt, synthetic construct
  source 1..88: mol_type = other RNA
tgctgtggctgagaaggcggagaggagccctgtgacattcttcgacacgccccccatgctctttgtgttcattgccctggggagatgg

SEQ ID NO: 9636 - RNA, 88 nt, synthetic construct
  source 1..88: mol_type = other RNA
tgctgtggctgagaaggcggagaggagccctgtgacattcttcgacacgccccccatgctctttgtgttcattgccctgggtaggtgg

SEQ ID NO: 9637 - RNA, 88 nt, synthetic construct
  source 1..88: mol_type = other RNA
tgctgtggctgagaaggcggagaggagccctgtgacattcttcgacacgccccccatgctctttgtgttcattgccctgggtagatgg

SEQ ID NO: 9638 - RNA, 88 nt, synthetic construct
  source 1..88: mol_type = other RNA
tgctgtggctgagaaggcggagaggagccctgtgacattcttcgacacgccccccatgctctttgtgttcattgccctggggaggtgg

SEQ ID NO: 9639 - RNA, 88 nt, synthetic construct
  source 1..88: mol_type = other RNA
tgctgtggctgagaaggcggagaggagccctgtgacattcttcgacacgccccccatgctctttgtgttcattgccctgggaagatgg

SEQ ID NO: 9640 - RNA, 88 nt, synthetic construct
  source 1..88: mol_type = other RNA
tgctgtggctgagaaggcggagaggagccctgtgacattcttcgacacgccccccatgctctttgtgttcattgccctgggcagatgg

SEQ ID NO: 9641 - RNA, 88 nt, synthetic construct
  source 1..88: mol_type = other RNA
tgctgtggctgagaaggcggagaggagccctgtgacattcttcgacacgccccccatgctctttgtgttcattgccctgggcaggtgg

SEQ ID NO: 9642 - RNA, 88 nt, synthetic construct
  source 1..88: mol_type = other RNA
tgctgtggctgagaaggcggagaggagccctgtgacattcttcgacacgccccccatgctctttgtgttcattgccctgggacggtgg

SEQ ID NO: 9643 - RNA, 88 nt, synthetic construct
  source 1..88: mol_type = other RNA
tgctgtggctgagaaggcggagaggagccctgtgacattcttcgacacgccccccatgctctttgtgttcattgccctgggccggtgg

SEQ ID NO: 9644 - RNA, 88 nt, synthetic construct
  source 1..88: mol_type = other RNA
tgctgtggctgagaaggcggagaggagccctgtgacattcttcgacacgccccccatgctctttgtgttcattgccctgggtcggtgg

SEQ ID NO: 9645 - RNA, 88 nt, synthetic construct
  source 1..88: mol_type = other RNA
tgctgtggctgagaaggcggagaggagccctgtgacattcttcgacacgccccccatgctctttgtgttcattgccctgggaaggtgg

SEQ ID NO: 9646 - RNA, 88 nt, synthetic construct
  source 1..88: mol_type = other RNA
tgctgtggctgagaaggcggagaggagccctgtgacattcttcgacacgccccccatgctctttgtgttcattgccctggggcggtgg

SEQ ID NO: 9647 - RNA, 89 nt, synthetic construct
  source 1..89: mol_type = other RNA
ttgctgtggctgagaaggcggagaggagccctgtgacattcttcgacacgccccccatgctctttgtgttcattgccctgggacggtgg

SEQ ID NO: 9648 - RNA, 89 nt, synthetic construct
  source 1..89: mol_type = other RNA
ttgctgtggctgagaaggcggagaggagccctgtgacattcttcgacacgccccccatgctctttgtgttcattgccctggggaggtgg

SEQ ID NO: 9649 - RNA, 89 nt, synthetic construct
  source 1..89: mol_type = other RNA
ttgctgtggctgagaaggcggagaggagccctgtgacattcttcgacacgccccccatgctctttgtgttcattgccctgggaaggtgg

SEQ ID NO: 9650 - RNA, 89 nt, synthetic construct
  source 1..89: mol_type = other RNA
ttgctgtggctgagaaggcggagaggagccctgtgacattcttcgacacgccccccatgctctttgtgttcattgccctgggtcggtgg

SEQ ID NO: 9651 - RNA, 89 nt, synthetic construct
  source 1..89: mol_type = other RNA
ttgctgtggctgagaaggcggagaggagccctgtgacattcttcgacacgccccccatgctctttgtgttcattgccctgggcaggtgg

SEQ ID NO: 9652 - RNA, 89 nt, synthetic construct
  source 1..89: mol_type = other RNA
ttgctgtggctgagaaggcggagaggagccctgtgacattcttcgacacgccccccatgctctttgtgttcattgccctgggaagatgg

SEQ ID NO: 9653 - RNA, 89 nt, synthetic construct
  source 1..89: mol_type = other RNA
ttgctgtggctgagaaggcggagaggagccctgtgacattcttcgacacgccccccatgctctttgtgttcattgccctgggtagatgg

SEQ ID NO: 9654 - RNA, 89 nt, synthetic construct
  source 1..89: mol_type = other RNA
ttgctgtggctgagaaggcggagaggagccctgtgacattcttcgacacgccccccatgctctttgtgttcattgccctgggcagatgg

SEQ ID NO: 9655 - RNA, 89 nt, synthetic construct
  source 1..89: mol_type = other RNA
ttgctgtggctgagaaggcggagaggagccctgtgacattcttcgacacgccccccatgctctttgtgttcattgccctggggcggtgg

SEQ ID NO: 9656 - RNA, 89 nt, synthetic construct
  source 1..89: mol_type = other RNA
ttgctgtggctgagaaggcggagaggagccctgtgacattcttcgacacgccccccatgctctttgtgttcattgccctggggagatgg

SEQ ID NO: 9657 - RNA, 89 nt, synthetic construct
  source 1..89: mol_type = other RNA
ttgctgtggctgagaaggcggagaggagccctgtgacattcttcgacacgccccccatgctctttgtgttcattgccctgggccggtgg

SEQ ID NO: 9658 - RNA, 89 nt, synthetic construct
  source 1..89: mol_type = other RNA
ttgctgtggctgagaaggcggagaggagccctgtgacattcttcgacacgccccccatgctctttgtgttcattgccctgggtaggtgg

SEQ ID NO: 9659 - RNA, 90 nt, synthetic construct
  source 1..90: mol_type = other RNA
gttgctgtggctgagaaggcggagaggagccctgtgacattcttcgacacgccccccatgctctttgtgttcattgccctgggaagatgg

SEQ ID NO: 9660 - RNA, 90 nt, synthetic construct
  source 1..90: mol_type = other RNA
gttgctgtggctgagaaggcggagaggagccctgtgacattcttcgacacgccccccatgctctttgtgttcattgccctgggcaggtgg

SEQ ID NO: 9661 - RNA, 90 nt, synthetic construct
  source 1..90: mol_type = other RNA
gttgctgtggctgagaaggcggagaggagccctgtgacattcttcgacacgccccccatgctctttgtgttcattgccctgggacggtgg

SEQ ID NO: 9662 - RNA, 90 nt, synthetic construct
  source 1..90: mol_type = other RNA
gttgctgtggctgagaaggcggagaggagccctgtgacattcttcgacacgccccccatgctctttgtgttcattgccctggggcggtgg

SEQ ID NO: 9663 - RNA, 90 nt, synthetic construct
  source 1..90: mol_type = other RNA
gttgctgtggctgagaaggcggagaggagccctgtgacattcttcgacacgccccccatgctctttgtgttcattgccctgggtagatgg

SEQ ID NO: 9664 - RNA, 90 nt, synthetic construct
  source 1..90: mol_type = other RNA
gttgctgtggctgagaaggcggagaggagccctgtgacattcttcgacacgccccccatgctctttgtgttcattgccctgggaaggtgg

SEQ ID NO: 9665 - RNA, 90 nt, synthetic construct
  source 1..90: mol_type = other RNA
gttgctgtggctgagaaggcggagaggagccctgtgacattcttcgacacgccccccatgctctttgtgttcattgccctgggccggtgg

SEQ ID NO: 9666 - RNA, 90 nt, synthetic construct
  source 1..90: mol_type = other RNA
gttgctgtggctgagaaggcggagaggagccctgtgacattcttcgacacgccccccatgctctttgtgttcattgccctggggagatgg

SEQ ID NO: 9667 - RNA, 90 nt, synthetic construct
  source 1..90: mol_type = other RNA
gttgctgtggctgagaaggcggagaggagccctgtgacattcttcgacacgccccccatgctctttgtgttcattgccctggggaggtgg

SEQ ID NO: 9668 - RNA, 90 nt, synthetic construct
  source 1..90: mol_type = other RNA
gttgctgtggctgagaaggcggagaggagccctgtgacattcttcgacacgccccccatgctctttgtgttcattgccctgggtcggtgg

SEQ ID NO: 9669 - RNA, 90 nt, synthetic construct
  source 1..90: mol_type = other RNA
gttgctgtggctgagaaggcggagaggagccctgtgacattcttcgacacgccccccatgctctttgtgttcattgccctgggtaggtgg

SEQ ID NO: 9670 - RNA, 90 nt, synthetic construct
  source 1..90: mol_type = other RNA
gttgctgtggctgagaaggcggagaggagccctgtgacattcttcgacacgccccccatgctctttgtgttcattgccctgggcagatgg

SEQ ID NO: 9671 - RNA, 91 nt, synthetic construct
  source 1..91: mol_type = other RNA
ggttgctgtggctgagaaggcggagaggagccctgtgacattcttcgacacgccccccatgctctttgtgttcattgccctgggcaggtgg

SEQ ID NO: 9672 - RNA, 91 nt, synthetic construct
  source 1..91: mol_type = other RNA
ggttgctgtggctgagaaggcggagaggagccctgtgacattcttcgacacgccccccatgctctttgtgttcattgccctgggacggtgg

SEQ ID NO: 9673 - RNA, 91 nt, synthetic construct
  source 1..91: mol_type = other RNA
ggttgctgtggctgagaaggcggagaggagccctgtgacattcttcgacacgccccccatgctctttgtgttcattgccctgggaaggtgg

SEQ ID NO: 9674 - RNA, 91 nt, synthetic construct
  source 1..91: mol_type = other RNA
ggttgctgtggctgagaaggcggagaggagccctgtgacattcttcgacacgccccccatgctctttgtgttcattgccctggggcggtgg

SEQ ID NO: 9675 - RNA, 91 nt, synthetic construct
  source 1..91: mol_type = other RNA
ggttgctgtggctgagaaggcggagaggagccctgtgacattcttcgacacgccccccatgctctttgtgttcattgccctgggtcggtgg

SEQ ID NO: 9676 - RNA, 91 nt, synthetic construct
  source 1..91: mol_type = other RNA
ggttgctgtggctgagaaggcggagaggagccctgtgacattcttcgacacgccccccatgctctttgtgttcattgccctgggccggtgg

SEQ ID NO: 9677 - RNA, 91 nt, synthetic construct
  source 1..91: mol_type = other RNA
ggttgctgtggctgagaaggcggagaggagccctgtgacattcttcgacacgccccccatgctctttgtgttcattgccctgggtaggtgg

SEQ ID NO: 9678 - RNA, 91 nt, synthetic construct
  source 1..91: mol_type = other RNA
ggttgctgtggctgagaaggcggagaggagccctgtgacattcttcgacacgccccccatgctctttgtgttcattgccctgggcagatgg

SEQ ID NO: 9679 - RNA, 91 nt, synthetic construct
  source 1..91: mol_type = other RNA
ggttgctgtggctgagaaggcggagaggagccctgtgacattcttcgacacgccccccatgctctttgtgttcattgccctgggaagatgg

SEQ ID NO: 9680 - RNA, 91 nt, synthetic construct
  source 1..91: mol_type = other RNA
ggttgctgtggctgagaaggcggagaggagccctgtgacattcttcgacacgccccccatgctctttgtgttcattgccctgggtagatgg

SEQ ID NO: 9681 - RNA, 91 nt, synthetic construct
  source 1..91: mol_type = other RNA
ggttgctgtggctgagaaggcggagaggagccctgtgacattcttcgacacgccccccatgctctttgtgttcattgccctggggagatgg

SEQ ID NO: 9682 - RNA, 91 nt, synthetic construct
  source 1..91: mol_type = other RNA
ggttgctgtggctgagaaggcggagaggagccctgtgacattcttcgacacgccccccatgctctttgtgttcattgccctggggaggtgg

SEQ ID NO: 9683 - RNA, 92 nt, synthetic construct
  source 1..92: mol_type = other RNA
tggttgctgtggctgagaaggcggagaggagccctgtgacattcttcgacacgccccccatgctctttgtgttcattgccctggggagatgg

SEQ ID NO: 9684 - RNA, 92 nt, synthetic construct
  source 1..92: mol_type = other RNA
tggttgctgtggctgagaaggcggagaggagccctgtgacattcttcgacacgccccccatgctctttgtgttcattgccctgggaagatgg

SEQ ID NO: 9685 - RNA, 92 nt, synthetic construct
  source 1..92: mol_type = other RNA
tggttgctgtggctgagaaggcggagaggagccctgtgacattcttcgacacgccccccatgctctttgtgttcattgccctgggacggtgg

SEQ ID NO: 9686 - RNA, 92 nt, synthetic construct
  source 1..92: mol_type = other RNA
tggttgctgtggctgagaaggcggagaggagccctgtgacattcttcgacacgccccccatgctctttgtgttcattgccctgggcagatgg

SEQ ID NO: 9687 - RNA, 92 nt, synthetic construct
  source 1..92: mol_type = other RNA
tggttgctgtggctgagaaggcggagaggagccctgtgacattcttcgacacgccccccatgctctttgtgttcattgccctgggccggtgg

SEQ ID NO: 9688 - RNA, 92 nt, synthetic construct
  source 1..92: mol_type = other RNA
tggttgctgtggctgagaaggcggagaggagccctgtgacattcttcgacacgccccccatgctctttgtgttcattgccctgggaaggtgg

SEQ ID NO: 9689 - RNA, 92 nt, synthetic construct
  source 1..92: mol_type = other RNA
tggttgctgtggctgagaaggcggagaggagccctgtgacattcttcgacacgccccccatgctctttgtgttcattgccctggggaggtgg

SEQ ID NO: 9690 - RNA, 92 nt, synthetic construct
  source 1..92: mol_type = other RNA
tggttgctgtggctgagaaggcggagaggagccctgtgacattcttcgacacgccccccatgctctttgtgttcattgccctgggtaggtgg

SEQ ID NO: 9691 - RNA, 92 nt, synthetic construct
  source 1..92: mol_type = other RNA
tggttgctgtggctgagaaggcggagaggagccctgtgacattcttcgacacgccccccatgctctttgtgttcattgccctgggtcggtgg

SEQ ID NO: 9692 - RNA, 92 nt, synthetic construct
  source 1..92: mol_type = other RNA
tggttgctgtggctgagaaggcggagaggagccctgtgacattcttcgacacgccccccatgctctttgtgttcattgccctggggcggtgg

SEQ ID NO: 9693 - RNA, 92 nt, synthetic construct
  source 1..92: mol_type = other RNA
tggttgctgtggctgagaaggcggagaggagccctgtgacattcttcgacacgccccccatgctctttgtgttcattgccctgggtagatgg

SEQ ID NO: 9694 - RNA, 92 nt, synthetic construct
  source 1..92: mol_type = other RNA
tggttgctgtggctgagaaggcggagaggagccctgtgacattcttcgacacgccccccatgctctttgtgttcattgccctgggcaggtgg

SEQ ID NO: 9695 - RNA, 93 nt, synthetic construct
  source 1..93: mol_type = other RNA
gtggttgctgtggctgagaaggcggagaggagccctgtgacattcttcgacacgccccccatgctctttgtgttcattgccctgggtcggtgg

SEQ ID NO: 9696 - RNA, 93 nt, synthetic construct
  source 1..93: mol_type = other RNA
gtggttgctgtggctgagaaggcggagaggagccctgtgacattcttcgacacgccccccatgctctttgtgttcattgccctgggcaggtgg

SEQ ID NO: 9697 - RNA, 93 nt, synthetic construct
  source 1..93: mol_type = other RNA
gtggttgctgtggctgagaaggcggagaggagccctgtgacattcttcgacacgccccccatgctctttgtgttcattgccctgggtagatgg

SEQ ID NO: 9698 - RNA, 93 nt, synthetic construct
  source 1..93: mol_type = other RNA
gtggttgctgtggctgagaaggcggagaggagccctgtgacattcttcgacacgccccccatgctctttgtgttcattgccctgggtaggtgg

SEQ ID NO: 9699 - RNA, 93 nt, synthetic construct
  source 1..93: mol_type = other RNA
gtggttgctgtggctgagaaggcggagaggagccctgtgacattcttcgacacgccccccatgctctttgtgttcattgccctgggaagatgg

SEQ ID NO: 9700 - RNA, 93 nt, synthetic construct
  source 1..93: mol_type = other RNA
gtggttgctgtggctgagaaggcggagaggagccctgtgacattcttcgacacgccccccatgctctttgtgttcattgccctgggaaggtgg

SEQ ID NO: 9701 - RNA, 93 nt, synthetic construct
  source 1..93: mol_type = other RNA
gtggttgctgtggctgagaaggcggagaggagccctgtgacattcttcgacacgccccccatgctctttgtgttcattgccctggggagatgg

SEQ ID NO: 9702 - RNA, 93 nt, synthetic construct
  source 1..93: mol_type = other RNA
gtggttgctgtggctgagaaggcggagaggagccctgtgacattcttcgacacgccccccatgctctttgtgttcattgccctgggccggtgg

SEQ ID NO: 9703 - RNA, 93 nt, synthetic construct
  source 1..93: mol_type = other RNA
gtggttgctgtggctgagaaggcggagaggagccctgtgacattcttcgacacgccccccatgctctttgtgttcattgccctgggcagatgg

SEQ ID NO: 9704 - RNA, 93 nt, synthetic construct
  source 1..93: mol_type = other RNA
gtggttgctgtggctgagaaggcggagaggagccctgtgacattcttcgacacgccccccatgctctttgtgttcattgccctggggcggtgg

SEQ ID NO: 9705 - RNA, 93 nt, synthetic construct
  source 1..93: mol_type = other RNA
gtggttgctgtggctgagaaggcggagaggagccctgtgacattcttcgacacgccccccatgctctttgtgttcattgccctggggaggtgg

SEQ ID NO: 9706 - RNA, 93 nt, synthetic construct
  source 1..93: mol_type = other RNA
gtggttgctgtggctgagaaggcggagaggagccctgtgacattcttcgacacgccccccatgctctttgtgttcattgccctgggacggtgg

SEQ ID NO: 9707 - RNA, 94 nt, synthetic construct
  source 1..94: mol_type = other RNA
ggtggttgctgtggctgagaaggcggagaggagccctgtgacattcttcgacacgccccccatgctctttgtgttcattgccctgggaaggtgg

SEQ ID NO: 9708 - RNA, 94 nt, synthetic construct
  source 1..94: mol_type = other RNA
ggtggttgctgtggctgagaaggcggagaggagccctgtgacattcttcgacacgccccccatgctctttgtgttcattgccctggggagatgg

SEQ ID NO: 9709 - RNA, 94 nt, synthetic construct
  source 1..94: mol_type = other RNA
ggtggttgctgtggctgagaaggcggagaggagccctgtgacattcttcgacacgccccccatgctctttgtgttcattgccctgggccggtgg

SEQ ID NO: 9710 - RNA, 94 nt, synthetic construct
  source 1..94: mol_type = other RNA
ggtggttgctgtggctgagaaggcggagaggagccctgtgacattcttcgacacgccccccatgctctttgtgttcattgccctgggacggtgg

SEQ ID NO: 9711 - RNA, 94 nt, synthetic construct
  source 1..94: mol_type = other RNA
ggtggttgctgtggctgagaaggcggagaggagccctgtgacattcttcgacacgccccccatgctctttgtgttcattgccctggggcggtgg

SEQ ID NO: 9712 - RNA, 94 nt, synthetic construct
  source 1..94: mol_type = other RNA
ggtggttgctgtggctgagaaggcggagaggagccctgtgacattcttcgacacgccccccatgctctttgtgttcattgccctgggtaggtgg

SEQ ID NO: 9713 - RNA, 94 nt, synthetic construct
  source 1..94: mol_type = other RNA
ggtggttgctgtggctgagaaggcggagaggagccctgtgacattcttcgacacgccccccatgctctttgtgttcattgccctgggcagatgg

SEQ ID NO: 9714 - RNA, 94 nt, synthetic construct
  source 1..94: mol_type = other RNA
ggtggttgctgtggctgagaaggcggagaggagccctgtgacattcttcgacacgccccccatgctctttgtgttcattgccctggggaggtgg

SEQ ID NO: 9715 - RNA, 94 nt, synthetic construct
  source 1..94: mol_type = other RNA
ggtggttgctgtggctgagaaggcggagaggagccctgtgacattcttcgacacgccccccatgctctttgtgttcattgccctgggaagatgg

SEQ ID NO: 9716 - RNA, 94 nt, synthetic construct
  source 1..94: mol_type = other RNA
ggtggttgctgtggctgagaaggcggagaggagccctgtgacattcttcgacacgccccccatgctctttgtgttcattgccctgggcaggtgg

SEQ ID NO: 9717 - RNA, 94 nt, synthetic construct
  source 1..94: mol_type = other RNA
ggtggttgctgtggctgagaaggcggagaggagccctgtgacattcttcgacacgccccccatgctctttgtgttcattgccctgggtcggtgg

SEQ ID NO: 9718 - RNA, 94 nt, synthetic construct
  source 1..94: mol_type = other RNA
ggtggttgctgtggctgagaaggcggagaggagccctgtgacattcttcgacacgccccccatgctctttgtgttcattgccctgggtagatgg

SEQ ID NO: 9719 - RNA, 95 nt, synthetic construct
  source 1..95: mol_type = other RNA
tggtggttgctgtggctgagaaggcggagaggagccctgtgacattcttcgacacgccccccatgctctttgtgttcattgccctgggaaggtgg

SEQ ID NO: 9720 - RNA, 95 nt, synthetic construct
  source 1..95: mol_type = other RNA
tggtggttgctgtggctgagaaggcggagaggagccctgtgacattcttcgacacgccccccatgctctttgtgttcattgccctgggtcggtgg

SEQ ID NO: 9721 - RNA, 95 nt, synthetic construct
  source 1..95: mol_type = other RNA
tggtggttgctgtggctgagaaggcggagaggagccctgtgacattcttcgacacgccccccatgctctttgtgttcattgccctgggcagatgg

SEQ ID NO: 9722 - RNA, 95 nt, synthetic construct
  source 1..95: mol_type = other RNA
tggtggttgctgtggctgagaaggcggagaggagccctgtgacattcttcgacacgccccccatgctctttgtgttcattgccctgggacggtgg

SEQ ID NO: 9723 - RNA, 95 nt, synthetic construct
  source 1..95: mol_type = other RNA
tggtggttgctgtggctgagaaggcggagaggagccctgtgacattcttcgacacgccccccatgctctttgtgttcattgccctgggaagatgg

SEQ ID NO: 9724 - RNA, 95 nt, synthetic construct
  source 1..95: mol_type = other RNA
tggtggttgctgtggctgagaaggcggagaggagccctgtgacattcttcgacacgccccccatgctctttgtgttcattgccctggggcggtgg

SEQ ID NO: 9725 - RNA, 95 nt, synthetic construct
  source 1..95: mol_type = other RNA
tggtggttgctgtggctgagaaggcggagaggagccctgtgacattcttcgacacgccccccatgctctttgtgttcattgccctggggaggtgg

SEQ ID NO: 9726 - RNA, 95 nt, synthetic construct
  source 1..95: mol_type = other RNA
tggtggttgctgtggctgagaaggcggagaggagccctgtgacattcttcgacacgccccccatgctctttgtgttcattgccctggggagatgg

SEQ ID NO: 9727 - RNA, 95 nt, synthetic construct
  source 1..95: mol_type = other RNA
tggtggttgctgtggctgagaaggcggagaggagccctgtgacattcttcgacacgccccccatgctctttgtgttcattgccctgggtaggtgg

SEQ ID NO: 9728 - RNA, 95 nt, synthetic construct
  source 1..95: mol_type = other RNA
tggtggttgctgtggctgagaaggcggagaggagccctgtgacattcttcgacacgccccccatgctctttgtgttcattgccctgggcaggtgg

SEQ ID NO: 9729 - RNA, 95 nt, synthetic construct
  source 1..95: mol_type = other RNA
tggtggttgctgtggctgagaaggcggagaggagccctgtgacattcttcgacacgccccccatgctctttgtgttcattgccctgggtagatgg

SEQ ID NO: 9730 - RNA, 95 nt, synthetic construct
  source 1..95: mol_type = other RNA
tggtggttgctgtggctgagaaggcggagaggagccctgtgacattcttcgacacgccccccatgctctttgtgttcattgccctgggccggtgg

SEQ ID NO: 9731 - RNA, 96 nt, synthetic construct
  source 1..96: mol_type = other RNA
ctggtggttgctgtggctgagaaggcggagaggagccctgtgacattcttcgacacgccccccatgctctttgtgttcattgccctgggaaggtgg

SEQ ID NO: 9732 - RNA, 96 nt, synthetic construct
  source 1..96: mol_type = other RNA
ctggtggttgctgtggctgagaaggcggagaggagccctgtgacattcttcgacacgccccccatgctctttgtgttcattgccctgggtcggtgg

SEQ ID NO: 9733 - RNA, 96 nt, synthetic construct
  source 1..96: mol_type = other RNA
ctggtggttgctgtggctgagaaggcggagaggagccctgtgacattcttcgacacgccccccatgctctttgtgttcattgccctggggcggtgg

SEQ ID NO: 9734 - RNA, 96 nt, synthetic construct
  source 1..96: mol_type = other RNA
ctggtggttgctgtggctgagaaggcggagaggagccctgtgacattcttcgacacgccccccatgctctttgtgttcattgccctgggacggtgg

SEQ ID NO: 9735 - RNA, 96 nt, synthetic construct
  source 1..96: mol_type = other RNA
ctggtggttgctgtggctgagaaggcggagaggagccctgtgacattcttcgacacgccccccatgctctttgtgttcattgccctgggtagatgg

SEQ ID NO: 9736 - RNA, 96 nt, synthetic construct
  source 1..96: mol_type = other RNA
ctggtggttgctgtggctgagaaggcggagaggagccctgtgacattcttcgacacgccccccatgctctttgtgttcattgccctgggaagatgg

SEQ ID NO: 9737 - RNA, 96 nt, synthetic construct
  source 1..96: mol_type = other RNA
ctggtggttgctgtggctgagaaggcggagaggagccctgtgacattcttcgacacgccccccatgctctttgtgttcattgccctgggcagatgg

SEQ ID NO: 9738 - RNA, 96 nt, synthetic construct
  source 1..96: mol_type = other RNA
ctggtggttgctgtggctgagaaggcggagaggagccctgtgacattcttcgacacgccccccatgctctttgtgttcattgccctgggtaggtgg

SEQ ID NO: 9739 - RNA, 96 nt, synthetic construct
  source 1..96: mol_type = other RNA
ctggtggttgctgtggctgagaaggcggagaggagccctgtgacattcttcgacacgccccccatgctctttgtgttcattgccctggggagatgg

SEQ ID NO: 9740 - RNA, 96 nt, synthetic construct
  source 1..96: mol_type = other RNA
ctggtggttgctgtggctgagaaggcggagaggagccctgtgacattcttcgacacgccccccatgctctttgtgttcattgccctgggccggtgg

SEQ ID NO: 9741 - RNA, 96 nt, synthetic construct
  source 1..96: mol_type = other RNA
ctggtggttgctgtggctgagaaggcggagaggagccctgtgacattcttcgacacgccccccatgctctttgtgttcattgccctggggaggtgg

SEQ ID NO: 9742 - RNA, 96 nt, synthetic construct
  source 1..96: mol_type = other RNA
ctggtggttgctgtggctgagaaggcggagaggagccctgtgacattcttcgacacgccccccatgctctttgtgttcattgccctgggcaggtgg

SEQ ID NO: 9743 - RNA, 97 nt, synthetic construct
  source 1..97: mol_type = other RNA
cctggtggttgctgtggctgagaaggcggagaggagccctgtgacattcttcgacacgccccccatgctctttgtgttcattgccctgggtaggtgg

SEQ ID NO: 9744 - RNA, 97 nt, synthetic construct
  source 1..97: mol_type = other RNA
cctggtggttgctgtggctgagaaggcggagaggagccctgtgacattcttcgacacgccccccatgctctttgtgttcattgccctggggaggtgg

SEQ ID NO: 9745 - RNA, 97 nt, synthetic construct
  source 1..97: mol_type = other RNA
cctggtggttgctgtggctgagaaggcggagaggagccctgtgacattcttcgacacgccccccatgctctttgtgttcattgccctgggtcggtgg

SEQ ID NO: 9746 - RNA, 97 nt, synthetic construct
  source 1..97: mol_type = other RNA
cctggtggttgctgtggctgagaaggcggagaggagccctgtgacattcttcgacacgccccccatgctctttgtgttcattgccctgggcagatgg

SEQ ID NO: 9747 - RNA, 97 nt, synthetic construct
  source 1..97: mol_type = other RNA
cctggtggttgctgtggctgagaaggcggagaggagccctgtgacattcttcgacacgccccccatgctctttgtgttcattgccctgggcaggtgg

SEQ ID NO: 9748 - RNA, 97 nt, synthetic construct
  source 1..97: mol_type = other RNA
cctggtggttgctgtggctgagaaggcggagaggagccctgtgacattcttcgacacgccccccatgctctttgtgttcattgccctgggccggtgg

SEQ ID NO: 9749 - RNA, 97 nt, synthetic construct
  source 1..97: mol_type = other RNA
cctggtggttgctgtggctgagaaggcggagaggagccctgtgacattcttcgacacgccccccatgctctttgtgttcattgccctgggtagatgg

SEQ ID NO: 9750 - RNA, 97 nt, synthetic construct
  source 1..97: mol_type = other RNA
cctggtggttgctgtggctgagaaggcggagaggagccctgtgacattcttcgacacgccccccatgctctttgtgttcattgccctgggacggtgg

SEQ ID NO: 9751 - RNA, 97 nt, synthetic construct
  source 1..97: mol_type = other RNA
cctggtggttgctgtggctgagaaggcggagaggagccctgtgacattcttcgacacgccccccatgctctttgtgttcattgccctgggaagatgg

SEQ ID NO: 9752 - RNA, 97 nt, synthetic construct
  source 1..97: mol_type = other RNA
cctggtggttgctgtggctgagaaggcggagaggagccctgtgacattcttcgacacgccccccatgctctttgtgttcattgccctggggcggtgg

SEQ ID NO: 9753 - RNA, 97 nt, synthetic construct
  source 1..97: mol_type = other RNA
cctggtggttgctgtggctgagaaggcggagaggagccctgtgacattcttcgacacgccccccatgctctttgtgttcattgccctggggagatgg

SEQ ID NO: 9754 - RNA, 97 nt, synthetic construct
  source 1..97: mol_type = other RNA
cctggtggttgctgtggctgagaaggcggagaggagccctgtgacattcttcgacacgccccccatgctctttgtgttcattgccctgggaaggtgg

SEQ ID NO: 9755 - RNA, 98 nt, synthetic construct
  source 1..98: mol_type = other RNA
tcctggtggttgctgtggctgagaaggcggagaggagccctgtgacattcttcgacacgccccccatgctctttgtgttcattgccctgggtaggtgg

SEQ ID NO: 9756 - RNA, 98 nt, synthetic construct
  source 1..98: mol_type = other RNA
tcctggtggttgctgtggctgagaaggcggagaggagccctgtgacattcttcgacacgccccccatgctctttgtgttcattgccctgggtagatgg

SEQ ID NO: 9757 - RNA, 98 nt, synthetic construct
  source 1..98: mol_type = other RNA
tcctggtggttgctgtggctgagaaggcggagaggagccctgtgacattcttcgacacgccccccatgctctttgtgttcattgccctggggagatgg

SEQ ID NO: 9758 - RNA, 98 nt, synthetic construct
  source 1..98: mol_type = other RNA
tcctggtggttgctgtggctgagaaggcggagaggagccctgtgacattcttcgacacgccccccatgctctttgtgttcattgccctgggcagatgg

SEQ ID NO: 9759 - RNA, 98 nt, synthetic construct
  source 1..98: mol_type = other RNA
tcctggtggttgctgtggctgagaaggcggagaggagccctgtgacattcttcgacacgccccccatgctctttgtgttcattgccctgggtcggtgg

SEQ ID NO: 9760 - RNA, 98 nt, synthetic construct
  source 1..98: mol_type = other RNA
tcctggtggttgctgtggctgagaaggcggagaggagccctgtgacattcttcgacacgccccccatgctctttgtgttcattgccctgggaagatgg

SEQ ID NO: 9761 - RNA, 98 nt, synthetic construct
  source 1..98: mol_type = other RNA
tcctggtggttgctgtggctgagaaggcggagaggagccctgtgacattcttcgacacgccccccatgctctttgtgttcattgccctgggacggtgg

SEQ ID NO: 9762 - RNA, 98 nt, synthetic construct
  source 1..98: mol_type = other RNA
tcctggtggttgctgtggctgagaaggcggagaggagccctgtgacattcttcgacacgccccccatgctctttgtgttcattgccctgggaaggtgg

SEQ ID NO: 9763 - RNA, 98 nt, synthetic construct
  source 1..98: mol_type = other RNA
tcctggtggttgctgtggctgagaaggcggagaggagccctgtgacattcttcgacacgccccccatgctctttgtgttcattgccctgggccggtgg

SEQ ID NO: 9764 - RNA, 98 nt, synthetic construct
  source 1..98: mol_type = other RNA
tcctggtggttgctgtggctgagaaggcggagaggagccctgtgacattcttcgacacgccccccatgctctttgtgttcattgccctggggaggtgg

SEQ ID NO: 9765 - RNA, 98 nt, synthetic construct
  source 1..98: mol_type = other RNA
tcctggtggttgctgtggctgagaaggcggagaggagccctgtgacattcttcgacacgccccccatgctctttgtgttcattgccctgggcaggtgg

SEQ ID NO: 9766 - RNA, 98 nt, synthetic construct
  source 1..98: mol_type = other RNA
tcctggtggttgctgtggctgagaaggcggagaggagccctgtgacattcttcgacacgccccccatgctctttgtgttcattgccctggggcggtgg

SEQ ID NO: 9767 - RNA, 99 nt, synthetic construct
  source 1..99: mol_type = other RNA
atcctggtggttgctgtggctgagaaggcggagaggagccctgtgacattcttcgacacgccccccatgctctttgtgttcattgccctgggaagatgg

SEQ ID NO: 9768 - RNA, 99 nt, synthetic construct
  source 1..99: mol_type = other RNA
atcctggtggttgctgtggctgagaaggcggagaggagccctgtgacattcttcgacacgccccccatgctctttgtgttcattgccctgggccggtgg

SEQ ID NO: 9769 - RNA, 99 nt, synthetic construct
  source 1..99: mol_type = other RNA
atcctggtggttgctgtggctgagaaggcggagaggagccctgtgacattcttcgacacgccccccatgctctttgtgttcattgccctggggcggtgg

SEQ ID NO: 9770 - RNA, 99 nt, synthetic construct
  source 1..99: mol_type = other RNA
atcctggtggttgctgtggctgagaaggcggagaggagccctgtgacattcttcgacacgccccccatgctctttgtgttcattgccctggggagatgg

SEQ ID NO: 9771 - RNA, 99 nt, synthetic construct
  source 1..99: mol_type = other RNA
atcctggtggttgctgtggctgagaaggcggagaggagccctgtgacattcttcgacacgccccccatgctctttgtgttcattgccctggggaggtgg

SEQ ID NO: 9772 - RNA, 99 nt, synthetic construct
  source 1..99: mol_type = other RNA
atcctggtggttgctgtggctgagaaggcggagaggagccctgtgacattcttcgacacgccccccatgctctttgtgttcattgccctgggcagatgg

SEQ ID NO: 9773 - RNA, 99 nt, synthetic construct
  source 1..99: mol_type = other RNA
atcctggtggttgctgtggctgagaaggcggagaggagccctgtgacattcttcgacacgccccccatgctctttgtgttcattgccctgggcaggtgg

SEQ ID NO: 9774 - RNA, 99 nt, synthetic construct
  source 1..99: mol_type = other RNA
atcctggtggttgctgtggctgagaaggcggagaggagccctgtgacattcttcgacacgccccccatgctctttgtgttcattgccctgggtaggtgg

SEQ ID NO: 9775 - RNA, 99 nt, synthetic construct
  source 1..99: mol_type = other RNA
atcctggtggttgctgtggctgagaaggcggagaggagccctgtgacattcttcgacacgccccccatgctctttgtgttcattgccctgggaaggtgg

SEQ ID NO: 9776 - RNA, 99 nt, synthetic construct
  source 1..99: mol_type = other RNA
atcctggtggttgctgtggctgagaaggcggagaggagccctgtgacattcttcgacacgccccccatgctctttgtgttcattgccctgggtagatgg

SEQ ID NO: 9777 - RNA, 99 nt, synthetic construct
  source 1..99: mol_type = other RNA
atcctggtggttgctgtggctgagaaggcggagaggagccctgtgacattcttcgacacgccccccatgctctttgtgttcattgccctgggacggtgg

SEQ ID NO: 9778 - RNA, 99 nt, synthetic construct
  source 1..99: mol_type = other RNA
atcctggtggttgctgtggctgagaaggcggagaggagccctgtgacattcttcgacacgccccccatgctctttgtgttcattgccctgggtcggtgg

SEQ ID NO: 9779 - RNA, 100 nt, synthetic construct
  source 1..100: mol_type = other RNA
catcctggtggttgctgtggctgagaaggcggagaggagccctgtgacattcttcgacacgccccccatgctctttgtgttcattgccctgggccggtgg

SEQ ID NO: 9780 - RNA, 100 nt, synthetic construct
  source 1..100: mol_type = other RNA
catcctggtggttgctgtggctgagaaggcggagaggagccctgtgacattcttcgacacgccccccatgctctttgtgttcattgccctgggcagatgg

SEQ ID NO: 9781 - RNA, 100 nt, synthetic construct
  source 1..100: mol_type = other RNA
catcctggtggttgctgtggctgagaaggcggagaggagccctgtgacattcttcgacacgccccccatgctctttgtgttcattgccctgggaagatgg

SEQ ID NO: 9782 - RNA, 100 nt, synthetic construct
  source 1..100: mol_type = other RNA
catcctggtggttgctgtggctgagaaggcggagaggagccctgtgacattcttcgacacgccccccatgctctttgtgttcattgccctgggtcggtgg

SEQ ID NO: 9783 - RNA, 100 nt, synthetic construct
  source 1..100: mol_type = other RNA
catcctggtggttgctgtggctgagaaggcggagaggagccctgtgacattcttcgacacgccccccatgctctttgtgttcattgccctgggcaggtgg

SEQ ID NO: 9784 - RNA, 100 nt, synthetic construct
  source 1..100: mol_type = other RNA
catcctggtggttgctgtggctgagaaggcggagaggagccctgtgacattcttcgacacgccccccatgctctttgtgttcattgccctgggtaggtgg

SEQ ID NO: 9785 - RNA, 100 nt, synthetic construct
  source 1..100: mol_type = other RNA
catcctggtggttgctgtggctgagaaggcggagaggagccctgtgacattcttcgacacgccccccatgctctttgtgttcattgccctgggtagatgg

SEQ ID NO: 9786 - RNA, 100 nt, synthetic construct
  source 1..100: mol_type = other RNA
catcctggtggttgctgtggctgagaaggcggagaggagccctgtgacattcttcgacacgccccccatgctctttgtgttcattgccctggggagatgg

SEQ ID NO: 9787 - RNA, 100 nt, synthetic construct
  source 1..100: mol_type = other RNA
catcctggtggttgctgtggctgagaaggcggagaggagccctgtgacattcttcgacacgccccccatgctctttgtgttcattgccctgggaaggtgg

SEQ ID NO: 9788 - RNA, 100 nt, synthetic construct
  source 1..100: mol_type = other RNA
catcctggtggttgctgtggctgagaaggcggagaggagccctgtgacattcttcgacacgccccccatgctctttgtgttcattgccctggggcggtgg

SEQ ID NO: 9789 - RNA, 100 nt, synthetic construct
  source 1..100: mol_type = other RNA
catcctggtggttgctgtggctgagaaggcggagaggagccctgtgacattcttcgacacgccccccatgctctttgtgttcattgccctgggacggtgg

SEQ ID NO: 9790 - RNA, 100 nt, synthetic construct
  source 1..100: mol_type = other RNA
catcctggtggttgctgtggctgagaaggcggagaggagccctgtgacattcttcgacacgccccccatgctctttgtgttcattgccctggggaggtgg

SEQ ID NO: 9791 - RNA, 20 nt, synthetic construct
  source 1..20: mol_type = other RNA
tggttgctgtggctgagaag

SEQ ID NO: 9792 - RNA, 20 nt, synthetic construct
  source 1..20: mol_type = other RNA
gtgttcattgccctggggag

SEQ ID NO: 9793 - RNA, 20 nt, synthetic construct
  source 1..20: mol_type = other RNA
gtgttcattgccctgggacg

SEQ ID NO: 9794 - RNA, 20 nt, synthetic construct
  source 1..20: mol_type = other RNA
tcattgccctgggcagatgg

SEQ ID NO: 9795 - RNA, 20 nt, synthetic construct
  source 1..20: mol_type = other RNA
tcattgccctgggtaggtgg

SEQ ID NO: 9796 - RNA, 20 nt, synthetic construct
  source 1..20: mol_type = other RNA
gtgttcattgccctgggcag

SEQ ID NO: 9797 - RNA, 20 nt, synthetic construct
  source 1..20: mol_type = other RNA
tcattgccctggggaggtgg

SEQ ID NO: 9798 - RNA, 20 nt, synthetic construct
  source 1..20: mol_type = other RNA
tcattgccctgggcaggtgg

SEQ ID NO: 9799 - RNA, 20 nt, synthetic construct
  source 1..20: mol_type = other RNA
tggtcatcctggtggttgct

SEQ ID NO: 9800 - RNA, 20 nt, synthetic construct
  source 1..20: mol_type = other RNA
gtgttcattgccctgggtag

SEQ ID NO: 9801 - RNA, 20 nt, synthetic construct
  source 1..20: mol_type = other RNA
gtgttcattgccctgggtcg

SEQ ID NO: 9802 - RNA, 20 nt, synthetic construct
  source 1..20: mol_type = other RNA
tcattgccctgggtcggtgg

SEQ ID NO: 9803 - RNA, 20 nt, synthetic construct
  source 1..20: mol_type = other RNA
atgtttattctctggtcatc

SEQ ID NO: 9804 - RNA, 20 nt, synthetic construct
  source 1..20: mol_type = other RNA
tcattgccctgggaaggtgg

SEQ ID NO: 9805 - RNA, 20 nt, synthetic construct
  source 1..20: mol_type = other RNA
tcattgccctgggacggtgg

SEQ ID NO: 9806 - RNA, 20 nt, synthetic construct
  source 1..20: mol_type = other RNA
tcattgccctggggagatgg

SEQ ID NO: 9807 - RNA, 20 nt, synthetic construct
  source 1..20: mol_type = other RNA
gtgttcattgccctggggcg

SEQ ID NO: 9808 - RNA, 20 nt, synthetic construct
  source 1..20: mol_type = other RNA
tcattgccctgggaagatgg

SEQ ID NO: 9809 - RNA, 20 nt, synthetic construct
  source 1..20: mol_type = other RNA
tttattctctggtcatcctg

SEQ ID NO: 9810 - RNA, 20 nt, synthetic construct
  source 1..20: mol_type = other RNA
tcattgccctgggtagatgg

SEQ ID NO: 9811 - RNA, 20 nt, synthetic construct
  source 1..20: mol_type = other RNA
gtgttcattgccctgggaag

SEQ ID NO: 9812 - RNA, 20 nt, synthetic construct
  source 1..20: mol_type = other RNA
tcattgccctggggcggtgg

SEQ ID NO: 9813 - RNA, 16 nt, synthetic construct
  source 1..16: mol_type = other RNA
attctctggtcatcct

SEQ ID NO: 9814 - RNA, 17 nt, synthetic construct
  source 1..17: mol_type = other RNA
tattctctggtcatcct

SEQ ID NO: 9815 - RNA, 18 nt, synthetic construct
  source 1..18: mol_type = other RNA
ttattctctggtcatcct

SEQ ID NO: 9816 - RNA, 19 nt, synthetic construct
  source 1..19: mol_type = other RNA
tttattctctggtcatcct

SEQ ID NO: 9817 - RNA, 20 nt, synthetic construct
  source 1..20: mol_type = other RNA
gtttattctctggtcatcct

SEQ ID NO: 9818 - RNA, 21 nt, synthetic construct
  source 1..21: mol_type = other RNA
tgtttattctctggtcatcct

SEQ ID NO: 9819 - RNA, 22 nt, synthetic construct
  source 1..22: mol_type = other RNA
atgtttattctctggtcatcct

SEQ ID NO: 9820-9826 - skipped (7 entries)

SEQ ID NO: 9827 - RNA, 10 nt, synthetic construct
  source 1..10: mol_type = other RNA
atgaccagag

SEQ ID NO: 9828 - RNA, 11 nt, synthetic construct
  source 1..11: mol_type = other RNA
atgaccagaga

SEQ ID NO: 9829 - RNA, 12 nt, synthetic construct
  source 1..12: mol_type = other RNA
atgaccagagaa

SEQ ID NO: 9830 - RNA, 13 nt, synthetic construct
  source 1..13: mol_type = other RNA
atgaccagagaat

SEQ ID NO: 9831 - RNA, 14 nt, synthetic construct
  source 1..14: mol_type = other RNA
atgaccagagaata

SEQ ID NO: 9832 - RNA, 15 nt, synthetic construct
  source 1..15: mol_type = other RNA
atgaccagagaataa

SEQ ID NO: 9833 - RNA, 16 nt, synthetic construct
  source 1..16: mol_type = other RNA
atgaccagagaataaa

SEQ ID NO: 9834 - RNA, 17 nt, synthetic construct
  source 1..17: mol_type = other RNA
atgaccagagaataaac

SEQ ID NO: 9835 - RNA, 18 nt, synthetic construct
  source 1..18: mol_type = other RNA
atgaccagagaataaaca

SEQ ID NO: 9836 - RNA, 19 nt, synthetic construct
  source 1..19: mol_type = other RNA
atgaccagagaataaacat

SEQ ID NO: 9837 - RNA, 93 nt, synthetic construct
  source 1..93: mol_type = other RNA
cggcccagggcaatgaacacaaagagcatggggggcgtgtcgaagaatgtcacagggctcctctccgccttctcagccacagcaacgaccagg

SEQ ID NO: 9838 - RNA, 93 nt, synthetic construct
  source 1..93: mol_type = other RNA
cggcccagggcaatgaacacaaagagcatggggggcgtgtcgaagaatgtcacagggctcctctccgccttctcagccacagcaacaaccagg

SEQ ID NO: 9839 - RNA, 93 nt, synthetic construct
  source 1..93: mol_type = other RNA
cggcccagggcaatgaacacaaagagcatggggggcgtgtcgaagaatgtcacagggctcctctccgccttctcagccacagcaaccaccagg

SEQ ID NO: 9840 - RNA, 94 nt, synthetic construct
  source 1..94: mol_type = other RNA
ccggcccagggcaatgaacacaaagagcatggggggcgtgtcgaagaatgtcacagggctcctctccgccttctcagccacagcaaccaccagg

SEQ ID NO: 9841 - RNA, 94 nt, synthetic construct
  source 1..94: mol_type = other RNA
ccggcccagggcaatgaacacaaagagcatggggggcgtgtcgaagaatgtcacagggctcctctccgccttctcagccacagcaacgaccagg

SEQ ID NO: 9842 - RNA, 94 nt, synthetic construct
  source 1..94: mol_type = other RNA
ccggcccagggcaatgaacacaaagagcatggggggcgtgtcgaagaatgtcacagggctcctctccgccttctcagccacagcaacaaccagg

SEQ ID NO: 9843 - RNA, 95 nt, synthetic construct
  source 1..95: mol_type = other RNA
accggcccagggcaatgaacacaaagagcatggggggcgtgtcgaagaatgtcacagggctcctctccgccttctcagccacagcaaccaccagg

SEQ ID NO: 9844 - RNA, 95 nt, synthetic construct
  source 1..95: mol_type = other RNA
accggcccagggcaatgaacacaaagagcatggggggcgtgtcgaagaatgtcacagggctcctctccgccttctcagccacagcaacgaccagg

SEQ ID NO: 9845 - RNA, 95 nt, synthetic construct
  source 1..95: mol_type = other RNA
accggcccagggcaatgaacacaaagagcatggggggcgtgtcgaagaatgtcacagggctcctctccgccttctcagccacagcaacaaccagg

SEQ ID NO: 9846 - RNA, 96 nt, synthetic construct
  source 1..96: mol_type = other RNA
caccggcccagggcaatgaacacaaagagcatggggggcgtgtcgaagaatgtcacagggctcctctccgccttctcagccacagcaaccaccagg

SEQ ID NO: 9847 - RNA, 96 nt, synthetic construct
  source 1..96: mol_type = other RNA
caccggcccagggcaatgaacacaaagagcatggggggcgtgtcgaagaatgtcacagggctcctctccgccttctcagccacagcaacaaccagg

SEQ ID NO: 9848 - RNA, 96 nt, synthetic construct
  source 1..96: mol_type = other RNA
caccggcccagggcaatgaacacaaagagcatggggggcgtgtcgaagaatgtcacagggctcctctccgccttctcagccacagcaacgaccagg

SEQ ID NO: 9849 - RNA, 97 nt, synthetic construct
  source 1..97: mol_type = other RNA
ccaccggcccagggcaatgaacacaaagagcatggggggcgtgtcgaagaatgtcacagggctcctctccgccttctcagccacagcaacgaccagg

SEQ ID NO: 9850 - RNA, 97 nt, synthetic construct
  source 1..97: mol_type = other RNA
ccaccggcccagggcaatgaacacaaagagcatggggggcgtgtcgaagaatgtcacagggctcctctccgccttctcagccacagcaaccaccagg

SEQ ID NO: 9851 - RNA, 97 nt, synthetic construct
  source 1..97: mol_type = other RNA
ccaccggcccagggcaatgaacacaaagagcatggggggcgtgtcgaagaatgtcacagggctcctctccgccttctcagccacagcaacaaccagg

SEQ ID NO: 9852 - RNA, 98 nt, synthetic construct
  source 1..98: mol_type = other RNA
gccaccggcccagggcaatgaacacaaagagcatggggggcgtgtcgaagaatgtcacagggctcctctccgccttctcagccacagcaaccaccagg

SEQ ID NO: 9853 - RNA, 98 nt, synthetic construct
  source 1..98: mol_type = other RNA
gccaccggcccagggcaatgaacacaaagagcatggggggcgtgtcgaagaatgtcacagggctcctctccgccttctcagccacagcaacgaccagg

SEQ ID NO: 9854 - RNA, 98 nt, synthetic construct
  source 1..98: mol_type = other RNA
gccaccggcccagggcaatgaacacaaagagcatggggggcgtgtcgaagaatgtcacagggctcctctccgccttctcagccacagcaacaaccagg

SEQ ID NO: 9855 - RNA, 99 nt, synthetic construct
  source 1..99: mol_type = other RNA
agccaccggcccagggcaatgaacacaaagagcatggggggcgtgtcgaagaatgtcacagggctcctctccgccttctcagccacagcaacaaccagg

SEQ ID NO: 9856 - RNA, 99 nt, synthetic construct
  source 1..99: mol_type = other RNA
agccaccggcccagggcaatgaacacaaagagcatggggggcgtgtcgaagaatgtcacagggctcctctccgccttctcagccacagcaacgaccagg

SEQ ID NO: 9857 - RNA, 99 nt, synthetic construct
  source 1..99: mol_type = other RNA
agccaccggcccagggcaatgaacacaaagagcatggggggcgtgtcgaagaatgtcacagggctcctctccgccttctcagccacagcaaccaccagg

SEQ ID NO: 9858 - RNA, 100 nt, synthetic construct
  source 1..100: mol_type = other RNA
cagccaccggcccagggcaatgaacacaaagagcatggggggcgtgtcgaagaatgtcacagggctcctctccgccttctcagccacagcaacgaccagg

SEQ ID NO: 9859 - RNA, 100 nt, synthetic construct
  source 1..100: mol_type = other RNA
cagccaccggcccagggcaatgaacacaaagagcatggggggcgtgtcgaagaatgtcacagggctcctctccgccttctcagccacagcaaccaccagg

SEQ ID NO: 9860 - RNA, 100 nt, synthetic construct
  source 1..100: mol_type = other RNA
cagccaccggcccagggcaatgaacacaaagagcatggggggcgtgtcgaagaatgtcacagggctcctctccgccttctcagccacagcaacaaccagg

SEQ ID NO: 9861 - RNA, 20 nt, synthetic construct
  source 1..20: mol_type = other RNA
ttctcagccacagcaacaac

SEQ ID NO: 9862 - RNA, 20 nt, synthetic construct
  source 1..20: mol_type = other RNA
ttctcagccacagcaacgac

SEQ ID NO: 9863 - RNA, 16 nt, synthetic construct
  source 1..16: mol_type = other RNA
ctctggtcatcctggt

SEQ ID NO: 9864 - RNA, 17 nt, synthetic construct
  source 1..17: mol_type = other RNA
tctctggtcatcctggt

SEQ ID NO: 9865 - RNA, 18 nt, synthetic construct
  source 1..18: mol_type = other RNA
ttctctggtcatcctggt

SEQ ID NO: 9866 - RNA, 19 nt, synthetic construct
  source 1..19: mol_type = other RNA
attctctggtcatcctggt

SEQ ID NO: 9867 - RNA, 20 nt, synthetic construct
  source 1..20: mol_type = other RNA
tattctctggtcatcctggt

SEQ ID NO: 9868 - RNA, 21 nt, synthetic construct
  source 1..21: mol_type = other RNA
ttattctctggtcatcctggt

SEQ ID NO: 9869 - RNA, 22 nt, synthetic construct
  source 1..22: mol_type = other RNA
tttattctctggtcatcctggt

SEQ ID NO: 9870-9876 - skipped (7 entries)

SEQ ID NO: 9877 - RNA, 10 nt, synthetic construct
  source 1..10: mol_type = other RNA
aggatgacca

SEQ ID NO: 9878 - RNA, 11 nt, synthetic construct
  source 1..11: mol_type = other RNA
aggatgaccag

SEQ ID NO: 9879 - RNA, 12 nt, synthetic construct
  source 1..12: mol_type = other RNA
aggatgaccaga

SEQ ID NO: 9880 - RNA, 13 nt, synthetic construct
  source 1..13: mol_type = other RNA
aggatgaccagag

SEQ ID NO: 9881 - RNA, 14 nt, synthetic construct
  source 1..14: mol_type = other RNA
aggatgaccagaga

SEQ ID NO: 9882 - RNA, 15 nt, synthetic construct
  source 1..15: mol_type = other RNA
aggatgaccagagaa

SEQ ID NO: 9883 - RNA, 16 nt, synthetic construct
  source 1..16: mol_type = other RNA
aggatgaccagagaat

SEQ ID NO: 9884 - RNA, 17 nt, synthetic construct
  source 1..17: mol_type = other RNA
aggatgaccagagaata

SEQ ID NO: 9885 - RNA, 18 nt, synthetic construct
  source 1..18: mol_type = other RNA
aggatgaccagagaataa

SEQ ID NO: 9886 - RNA, 19 nt, synthetic construct
  source 1..19: mol_type = other RNA
aggatgaccagagaataaa

SEQ ID NO: 9887 - RNA, 90 nt, synthetic construct
  source 1..90: mol_type = other RNA
cggcccagggcaatgaacacaaagagcatggggggcgtgtcgaagaatgtcacagggctcctctccgccttctcagccacagcaaccacc

SEQ ID NO: 9888 - RNA, 91 nt, synthetic construct
  source 1..91: mol_type = other RNA
ccggcccagggcaatgaacacaaagagcatggggggcgtgtcgaagaatgtcacagggctcctctccgccttctcagccacagcaaccacc

SEQ ID NO: 9889 - RNA, 92 nt, synthetic construct
  source 1..92: mol_type = other RNA
accggcccagggcaatgaacacaaagagcatggggggcgtgtcgaagaatgtcacagggctcctctccgccttctcagccacagcaaccacc

SEQ ID NO: 9890 - RNA, 93 nt, synthetic construct
  source 1..93: mol_type = other RNA
caccggcccagggcaatgaacacaaagagcatggggggcgtgtcgaagaatgtcacagggctcctctccgccttctcagccacagcaaccacc

SEQ ID NO: 9891 - RNA, 94 nt, synthetic construct
  source 1..94: mol_type = other RNA
ccaccggcccagggcaatgaacacaaagagcatggggggcgtgtcgaagaatgtcacagggctcctctccgccttctcagccacagcaaccacc

SEQ ID NO: 9892 - RNA, 95 nt, synthetic construct
  source 1..95: mol_type = other RNA
gccaccggcccagggcaatgaacacaaagagcatggggggcgtgtcgaagaatgtcacagggctcctctccgccttctcagccacagcaaccacc

SEQ ID NO: 9893 - RNA, 96 nt, synthetic construct
  source 1..96: mol_type = other RNA
agccaccggcccagggcaatgaacacaaagagcatggggggcgtgtcgaagaatgtcacagggctcctctccgccttctcagccacagcaaccacc

SEQ ID NO: 9894 - RNA, 97 nt, synthetic construct
  source 1..97: mol_type = other RNA
cagccaccggcccagggcaatgaacacaaagagcatggggggcgtgtcgaagaatgtcacagggctcctctccgccttctcagccacagcaaccacc

SEQ ID NO: 9895 - RNA, 98 nt, synthetic construct
  source 1..98: mol_type = other RNA
ccagccaccggcccagggcaatgaacacaaagagcatggggggcgtgtcgaagaatgtcacagggctcctctccgccttctcagccacagcaaccacc

SEQ ID NO: 9896 - RNA, 99 nt, synthetic construct
  source 1..99: mol_type = other RNA
tccagccaccggcccagggcaatgaacacaaagagcatggggggcgtgtcgaagaatgtcacagggctcctctccgccttctcagccacagcaaccacc

SEQ ID NO: 9897 - RNA, 100 nt, synthetic construct
  source 1..100: mol_type = other RNA
ttccagccaccggcccagggcaatgaacacaaagagcatggggggcgtgtcgaagaatgtcacagggctcctctccgccttctcagccacagcaaccacc

SEQ ID NO: 9898 - RNA, 16 nt, synthetic construct
  source 1..16: mol_type = other RNA
tggtcatcctggtggt

SEQ ID NO: 9899 - RNA, 17 nt, synthetic construct
  source 1..17: mol_type = other RNA
ctggtcatcctggtggt

SEQ ID NO: 9900 - RNA, 18 nt, synthetic construct
  source 1..18: mol_type = other RNA
tctggtcatcctggtggt

SEQ ID NO: 9901 - RNA, 19 nt, synthetic construct
  source 1..19: mol_type = other RNA
ctctggtcatcctggtggt

SEQ ID NO: 9902 - RNA, 20 nt, synthetic construct
  source 1..20: mol_type = other RNA
tctctggtcatcctggtggt

SEQ ID NO: 9903 - RNA, 21 nt, synthetic construct
  source 1..21: mol_type = other RNA
ttctctggtcatcctggtggt

SEQ ID NO: 9904 - RNA, 22 nt, synthetic construct
  source 1..22: mol_type = other RNA
attctctggtcatcctggtggt

SEQ ID NO: 9905-9909 - skipped (5 entries)

SEQ ID NO: 9910 - RNA, 10 nt, synthetic construct
  source 1..10: mol_type = other RNA
accaggatga

SEQ ID NO: 9911 - RNA, 11 nt, synthetic construct
  source 1..11: mol_type = other RNA
accaggatgac

SEQ ID NO: 9912 - RNA, 12 nt, synthetic construct
  source 1..12: mol_type = other RNA
accaggatgacc

SEQ ID NO: 9913 - RNA, 13 nt, synthetic construct
  source 1..13: mol_type = other RNA
accaggatgacca

SEQ ID NO: 9914 - RNA, 14 nt, synthetic construct
  source 1..14: mol_type = other RNA
accaggatgaccag

SEQ ID NO: 9915 - RNA, 15 nt, synthetic construct
  source 1..15: mol_type = other RNA
accaggatgaccaga

SEQ ID NO: 9916 - RNA, 16 nt, synthetic construct
  source 1..16: mol_type = other RNA
accaggatgaccagag

SEQ ID NO: 9917 - RNA, 17 nt, synthetic construct
  source 1..17: mol_type = other RNA
accaggatgaccagaga

SEQ ID NO: 9918 - RNA, 18 nt, synthetic construct
  source 1..18: mol_type = other RNA
accaggatgaccagagaa

SEQ ID NO: 9919 - RNA, 19 nt, synthetic construct
  source 1..19: mol_type = other RNA
accaggatgaccagagaat

SEQ ID NO: 9920 - RNA, 87 nt, synthetic construct
  source 1..87: mol_type = other RNA
cggcccagggcaatgaacacaaagagcatggggggcgtgtcgaagaatgtcacagggctcctctccgccttctcagccacagcaacc

SEQ ID NO: 9921 - RNA, 88 nt, synthetic construct
  source 1..88: mol_type = other RNA
ccggcccagggcaatgaacacaaagagcatggggggcgtgtcgaagaatgtcacagggctcctctccgccttctcagccacagcaacc

SEQ ID NO: 9922 - RNA, 89 nt, synthetic construct
  source 1..89: mol_type = other RNA
accggcccagggcaatgaacacaaagagcatggggggcgtgtcgaagaatgtcacagggctcctctccgccttctcagccacagcaacc

SEQ ID NO: 9923 - RNA, 90 nt, synthetic construct
  source 1..90: mol_type = other RNA
caccggcccagggcaatgaacacaaagagcatggggggcgtgtcgaagaatgtcacagggctcctctccgccttctcagccacagcaacc

SEQ ID NO: 9924 - RNA, 91 nt, synthetic construct
  source 1..91: mol_type = other RNA
ccaccggcccagggcaatgaacacaaagagcatggggggcgtgtcgaagaatgtcacagggctcctctccgccttctcagccacagcaacc

SEQ ID NO: 9925 - RNA, 92 nt, synthetic construct
  source 1..92: mol_type = other RNA
gccaccggcccagggcaatgaacacaaagagcatggggggcgtgtcgaagaatgtcacagggctcctctccgccttctcagccacagcaacc

SEQ ID NO: 9926 - RNA, 93 nt, synthetic construct
  source 1..93: mol_type = other RNA
agccaccggcccagggcaatgaacacaaagagcatggggggcgtgtcgaagaatgtcacagggctcctctccgccttctcagccacagcaacc

SEQ ID NO: 9927 - RNA, 94 nt, synthetic construct
  source 1..94: mol_type = other RNA
cagccaccggcccagggcaatgaacacaaagagcatggggggcgtgtcgaagaatgtcacagggctcctctccgccttctcagccacagcaacc

SEQ ID NO: 9928 - RNA, 95 nt, synthetic construct
  source 1..95: mol_type = other RNA
ccagccaccggcccagggcaatgaacacaaagagcatggggggcgtgtcgaagaatgtcacagggctcctctccgccttctcagccacagcaacc

SEQ ID NO: 9929 - RNA, 96 nt, synthetic construct
  source 1..96: mol_type = other RNA
tccagccaccggcccagggcaatgaacacaaagagcatggggggcgtgtcgaagaatgtcacagggctcctctccgccttctcagccacagcaacc

SEQ ID NO: 9930 - RNA, 97 nt, synthetic construct
  source 1..97: mol_type = other RNA
ttccagccaccggcccagggcaatgaacacaaagagcatggggggcgtgtcgaagaatgtcacagggctcctctccgccttctcagccacagcaacc

SEQ ID NO: 9931 - RNA, 98 nt, synthetic construct
  source 1..98: mol_type = other RNA
gttccagccaccggcccagggcaatgaacacaaagagcatggggggcgtgtcgaagaatgtcacagggctcctctccgccttctcagccacagcaacc

SEQ ID NO: 9932 - RNA, 99 nt, synthetic construct
  source 1..99: mol_type = other RNA
tgttccagccaccggcccagggcaatgaacacaaagagcatggggggcgtgtcgaagaatgtcacagggctcctctccgccttctcagccacagcaacc

SEQ ID NO: 9933 - RNA, 100 nt, synthetic construct
  source 1..100: mol_type = other RNA
gtgttccagccaccggcccagggcaatgaacacaaagagcatggggggcgtgtcgaagaatgtcacagggctcctctccgccttctcagccacagcaacc

SEQ ID NO: 9934 - RNA, 16 nt, synthetic construct
  source 1..16: mol_type = other RNA
tcatcctggtggttgc

SEQ ID NO: 9935 - RNA, 17 nt, synthetic construct
  source 1..17: mol_type = other RNA
gtcatcctggtggttgc

SEQ ID NO: 9936 - RNA, 18 nt, synthetic construct
  source 1..18: mol_type = other RNA
ggtcatcctggtggttgc

SEQ ID NO: 9937 - RNA, 19 nt, synthetic construct
  source 1..19: mol_type = other RNA
tggtcatcctggtggttgc

SEQ ID NO: 9938 - RNA, 20 nt, synthetic construct
  source 1..20: mol_type = other RNA
ctggtcatcctggtggttgc

SEQ ID NO: 9939 - RNA, 21 nt, synthetic construct
  source 1..21: mol_type = other RNA
tctggtcatcctggtggttgc

SEQ ID NO: 9940 - RNA, 22 nt, synthetic construct
  source 1..22: mol_type = other RNA
ctctggtcatcctggtggttgc

SEQ ID NO: 9941-9945 - skipped (5 entries)

SEQ ID NO: 9946 - RNA, 10 nt, synthetic construct
  source 1..10: mol_type = other RNA
accaccagga

SEQ ID NO: 9947 - RNA, 11 nt, synthetic construct
  source 1..11: mol_type = other RNA
accaccaggat

SEQ ID NO: 9948 - RNA, 12 nt, synthetic construct
  source 1..12: mol_type = other RNA
accaccaggatg

SEQ ID NO: 9949 - RNA, 13 nt, synthetic construct
  source 1..13: mol_type = other RNA
accaccaggatga

SEQ ID NO: 9950 - RNA, 14 nt, synthetic construct
  source 1..14: mol_type = other RNA
accaccaggatgac

SEQ ID NO: 9951 - RNA, 15 nt, synthetic construct
  source 1..15: mol_type = other RNA
accaccaggatgacc

SEQ ID NO: 9952 - RNA, 16 nt, synthetic construct
  source 1..16: mol_type = other RNA
accaccaggatgacca

SEQ ID NO: 9953 - RNA, 17 nt, synthetic construct
  source 1..17: mol_type = other RNA
accaccaggatgaccag

SEQ ID NO: 9954 - RNA, 18 nt, synthetic construct
  source 1..18: mol_type = other RNA
accaccaggatgaccaga

SEQ ID NO: 9955 - RNA, 19 nt, synthetic construct
  source 1..19: mol_type = other RNA
accaccaggatgaccagag

SEQ ID NO: 9956 - RNA, 84 nt, synthetic construct
  source 1..84: mol_type = other RNA
cggcccagggcaatgaacacaaagagcatggggggcgtgtcgaagaatgtcacagggctcctctccgccttctcagccacagca

SEQ ID NO: 9957 - RNA, 85 nt, synthetic construct
  source 1..85: mol_type = other RNA
ccggcccagggcaatgaacacaaagagcatggggggcgtgtcgaagaatgtcacagggctcctctccgccttctcagccacagca

SEQ ID NO: 9958 - RNA, 86 nt, synthetic construct
  source 1..86: mol_type = other RNA
accggcccagggcaatgaacacaaagagcatggggggcgtgtcgaagaatgtcacagggctcctctccgccttctcagccacagca

SEQ ID NO: 9959 - RNA, 87 nt, synthetic construct
  source 1..87: mol_type = other RNA
caccggcccagggcaatgaacacaaagagcatggggggcgtgtcgaagaatgtcacagggctcctctccgccttctcagccacagca

SEQ ID NO: 9960 - RNA, 88 nt, synthetic construct
  source 1..88: mol_type = other RNA
ccaccggcccagggcaatgaacacaaagagcatggggggcgtgtcgaagaatgtcacagggctcctctccgccttctcagccacagca

SEQ ID NO: 9961 - RNA, 89 nt, synthetic construct
  source 1..89: mol_type = other RNA
gccaccggcccagggcaatgaacacaaagagcatggggggcgtgtcgaagaatgtcacagggctcctctccgccttctcagccacagca

SEQ ID NO: 9962 - RNA, 90 nt, synthetic construct
  source 1..90: mol_type = other RNA
agccaccggcccagggcaatgaacacaaagagcatggggggcgtgtcgaagaatgtcacagggctcctctccgccttctcagccacagca

SEQ ID NO: 9963 - RNA, 91 nt, synthetic construct
  source 1..91: mol_type = other RNA
cagccaccggcccagggcaatgaacacaaagagcatggggggcgtgtcgaagaatgtcacagggctcctctccgccttctcagccacagca

SEQ ID NO: 9964 - RNA, 92 nt, synthetic construct
  source 1..92: mol_type = other RNA
ccagccaccggcccagggcaatgaacacaaagagcatggggggcgtgtcgaagaatgtcacagggctcctctccgccttctcagccacagca

SEQ ID NO: 9965 - RNA, 93 nt, synthetic construct
  source 1..93: mol_type = other RNA
tccagccaccggcccagggcaatgaacacaaagagcatggggggcgtgtcgaagaatgtcacagggctcctctccgccttctcagccacagca

SEQ ID NO: 9966 - RNA, 94 nt, synthetic construct
  source 1..94: mol_type = other RNA
ttccagccaccggcccagggcaatgaacacaaagagcatggggggcgtgtcgaagaatgtcacagggctcctctccgccttctcagccacagca

SEQ ID NO: 9967 - RNA, 95 nt, synthetic construct
  source 1..95: mol_type = other RNA
gttccagccaccggcccagggcaatgaacacaaagagcatggggggcgtgtcgaagaatgtcacagggctcctctccgccttctcagccacagca

SEQ ID NO: 9968 - RNA, 96 nt, synthetic construct
  source 1..96: mol_type = other RNA
tgttccagccaccggcccagggcaatgaacacaaagagcatggggggcgtgtcgaagaatgtcacagggctcctctccgccttctcagccacagca

SEQ ID NO: 9969 - RNA, 97 nt, synthetic construct
  source 1..97: mol_type = other RNA
gtgttccagccaccggcccagggcaatgaacacaaagagcatggggggcgtgtcgaagaatgtcacagggctcctctccgccttctcagccacagca

SEQ ID NO: 9970 - RNA, 98 nt, synthetic construct
  source 1..98: mol_type = other RNA
agtgttccagccaccggcccagggcaatgaacacaaagagcatggggggcgtgtcgaagaatgtcacagggctcctctccgccttctcagccacagca

SEQ ID NO: 9971 - RNA, 99 nt, synthetic construct
  source 1..99: mol_type = other RNA
aagtgttccagccaccggcccagggcaatgaacacaaagagcatggggggcgtgtcgaagaatgtcacagggctcctctccgccttctcagccacagca

SEQ ID NO: 9972 - RNA, 100 nt, synthetic construct
  source 1..100: mol_type = other RNA
caagtgttccagccaccggcccagggcaatgaacacaaagagcatggggggcgtgtcgaagaatgtcacagggctcctctccgccttctcagccacagca

SEQ ID NO: 9973 - RNA, 16 nt, synthetic construct
  source 1..16: mol_type = other RNA
tcctggtggttgctgt

SEQ ID NO: 9974 - RNA, 17 nt, synthetic construct
  source 1..17: mol_type = other RNA
atcctggtggttgctgt

SEQ ID NO: 9975 - RNA, 18 nt, synthetic construct
  source 1..18: mol_type = other RNA
catcctggtggttgctgt

SEQ ID NO: 9976 - RNA, 19 nt, synthetic construct
  source 1..19: mol_type = other RNA
tcatcctggtggttgctgt

SEQ ID NO: 9977 - RNA, 20 nt, synthetic construct
  source 1..20: mol_type = other RNA
gtcatcctggtggttgctgt

SEQ ID NO: 9978 - RNA, 21 nt, synthetic construct
  source 1..21: mol_type = other RNA
ggtcatcctggtggttgctgt

SEQ ID NO: 9979 - RNA, 22 nt, synthetic construct
  source 1..22: mol_type = other RNA
tggtcatcctggtggttgctgt

SEQ ID NO: 9980-9984 - skipped (5 entries)

SEQ ID NO: 9985 - RNA, 10 nt, synthetic construct
  source 1..10: mol_type = other RNA
gcaaccacca

SEQ ID NO: 9986 - RNA, 11 nt, synthetic construct
  source 1..11: mol_type = other RNA
gcaaccaccag

SEQ ID NO: 9987 - RNA, 12 nt, synthetic construct
  source 1..12: mol_type = other RNA
gcaaccaccagg

SEQ ID NO: 9988 - RNA, 13 nt, synthetic construct
  source 1..13: mol_type = other RNA
gcaaccaccagga

SEQ ID NO: 9989 - RNA, 14 nt, synthetic construct
  source 1..14: mol_type = other RNA
gcaaccaccaggat

SEQ ID NO: 9990 - RNA, 15 nt, synthetic construct
  source 1..15: mol_type = other RNA
gcaaccaccaggatg

SEQ ID NO: 9991 - RNA, 16 nt, synthetic construct
  source 1..16: mol_type = other RNA
gcaaccaccaggatga

SEQ ID NO: 9992 - RNA, 17 nt, synthetic construct
  source 1..17: mol_type = other RNA
gcaaccaccaggatgac

SEQ ID NO: 9993 - RNA, 18 nt, synthetic construct
  source 1..18: mol_type = other RNA
gcaaccaccaggatgacc

SEQ ID NO: 9994 - RNA, 19 nt, synthetic construct
  source 1..19: mol_type = other RNA
gcaaccaccaggatgacca

SEQ ID NO: 9995 - RNA, 81 nt, synthetic construct
  source 1..81: mol_type = other RNA
cggcccagggcaatgaacacaaagagcatggggggcgtgtcgaagaatgtcacagggctcctctccgccttctcagccaca

SEQ ID NO: 9996 - RNA, 82 nt, synthetic construct
  source 1..82: mol_type = other RNA
ccggcccagggcaatgaacacaaagagcatggggggcgtgtcgaagaatgtcacagggctcctctccgccttctcagccaca

SEQ ID NO: 9997 - RNA, 83 nt, synthetic construct
  source 1..83: mol_type = other RNA
accggcccagggcaatgaacacaaagagcatggggggcgtgtcgaagaatgtcacagggctcctctccgccttctcagccaca

SEQ ID NO: 9998 - RNA, 84 nt, synthetic construct
  source 1..84: mol_type = other RNA
caccggcccagggcaatgaacacaaagagcatggggggcgtgtcgaagaatgtcacagggctcctctccgccttctcagccaca

SEQ ID NO: 9999 - RNA, 85 nt, synthetic construct
  source 1..85: mol_type = other RNA
ccaccggcccagggcaatgaacacaaagagcatggggggcgtgtcgaagaatgtcacagggctcctctccgccttctcagccaca

SEQ ID NO: 10000 - RNA, 86 nt, synthetic construct
  source 1..86: mol_type = other RNA
gccaccggcccagggcaatgaacacaaagagcatggggggcgtgtcgaagaatgtcacagggctcctctccgccttctcagccaca

SEQ ID NO: 10001 - RNA, 87 nt, synthetic construct
  source 1..87: mol_type = other RNA
agccaccggcccagggcaatgaacacaaagagcatggggggcgtgtcgaagaatgtcacagggctcctctccgccttctcagccaca

SEQ ID NO: 10002 - RNA, 88 nt, synthetic construct
  source 1..88: mol_type = other RNA
cagccaccggcccagggcaatgaacacaaagagcatggggggcgtgtcgaagaatgtcacagggctcctctccgccttctcagccaca

SEQ ID NO: 10003 - RNA, 89 nt, synthetic construct
  source 1..89: mol_type = other RNA
ccagccaccggcccagggcaatgaacacaaagagcatggggggcgtgtcgaagaatgtcacagggctcctctccgccttctcagccaca

SEQ ID NO: 10004 - RNA, 90 nt, synthetic construct
  source 1..90: mol_type = other RNA
tccagccaccggcccagggcaatgaacacaaagagcatggggggcgtgtcgaagaatgtcacagggctcctctccgccttctcagccaca

SEQ ID NO: 10005 - RNA, 91 nt, synthetic construct
  source 1..91: mol_type = other RNA
ttccagccaccggcccagggcaatgaacacaaagagcatggggggcgtgtcgaagaatgtcacagggctcctctccgccttctcagccaca

SEQ ID NO: 10006 - RNA, 92 nt, synthetic construct
  source 1..92: mol_type = other RNA
gttccagccaccggcccagggcaatgaacacaaagagcatggggggcgtgtcgaagaatgtcacagggctcctctccgccttctcagccaca

SEQ ID NO: 10007 - RNA, 93 nt, synthetic construct
  source 1..93: mol_type = other RNA
tgttccagccaccggcccagggcaatgaacacaaagagcatggggggcgtgtcgaagaatgtcacagggctcctctccgccttctcagccaca

SEQ ID NO: 10008 - RNA, 94 nt, synthetic construct
  source 1..94: mol_type = other RNA
gtgttccagccaccggcccagggcaatgaacacaaagagcatggggggcgtgtcgaagaatgtcacagggctcctctccgccttctcagccaca

SEQ ID NO: 10009 - RNA, 95 nt, synthetic construct
  source 1..95: mol_type = other RNA
agtgttccagccaccggcccagggcaatgaacacaaagagcatggggggcgtgtcgaagaatgtcacagggctcctctccgccttctcagccaca

SEQ ID NO: 10010 - RNA, 96 nt, synthetic construct
  source 1..96: mol_type = other RNA
aagtgttccagccaccggcccagggcaatgaacacaaagagcatggggggcgtgtcgaagaatgtcacagggctcctctccgccttctcagccaca

SEQ ID NO: 10011 - RNA, 97 nt, synthetic construct
  source 1..97: mol_type = other RNA
caagtgttccagccaccggcccagggcaatgaacacaaagagcatggggggcgtgtcgaagaatgtcacagggctcctctccgccttctcagccaca

SEQ ID NO: 10012 - RNA, 98 nt, synthetic construct
  source 1..98: mol_type = other RNA
ccaagtgttccagccaccggcccagggcaatgaacacaaagagcatggggggcgtgtcgaagaatgtcacagggctcctctccgccttctcagccaca

SEQ ID NO: 10013 - RNA, 99 nt, synthetic construct
  source 1..99: mol_type = other RNA
gccaagtgttccagccaccggcccagggcaatgaacacaaagagcatggggggcgtgtcgaagaatgtcacagggctcctctccgccttctcagccaca

SEQ ID NO: 10014 - RNA, 100 nt, synthetic construct
  source 1..100: mol_type = other RNA
tgccaagtgttccagccaccggcccagggcaatgaacacaaagagcatggggggcgtgtcgaagaatgtcacagggctcctctccgccttctcagccaca

SEQ ID NO: 10015 - RNA, 16 nt, synthetic construct
  source 1..16: mol_type = other RNA
ttgctgtggctgagaa

SEQ ID NO: 10016 - RNA, 17 nt, synthetic construct
  source 1..17: mol_type = other RNA
gttgctgtggctgagaa

SEQ ID NO: 10017 - RNA, 18 nt, synthetic construct
  source 1..18: mol_type = other RNA
ggttgctgtggctgagaa

SEQ ID NO: 10018 - RNA, 19 nt, synthetic construct
  source 1..19: mol_type = other RNA
tggttgctgtggctgagaa

SEQ ID NO: 10019 - RNA, 20 nt, synthetic construct
  source 1..20: mol_type = other RNA
gtggttgctgtggctgagaa

SEQ ID NO: 10020 - RNA, 21 nt, synthetic construct
  source 1..21: mol_type = other RNA
ggtggttgctgtggctgagaa

SEQ ID NO: 10021 - RNA, 22 nt, synthetic construct
  source 1..22: mol_type = other RNA
tggtggttgctgtggctgagaa

SEQ ID NO: 10022-10026 - skipped (5 entries)

SEQ ID NO: 10027 - RNA, 10 nt, synthetic construct
  source 1..10: mol_type = other RNA
tcagccacag

SEQ ID NO: 10028 - RNA, 11 nt, synthetic construct
  source 1..11: mol_type = other RNA
tcagccacagc

SEQ ID NO: 10029 - RNA, 12 nt, synthetic construct
  source 1..12: mol_type = other RNA
tcagccacagca

SEQ ID NO: 10030 - RNA, 13 nt, synthetic construct
  source 1..13: mol_type = other RNA
tcagccacagcaa

SEQ ID NO: 10031 - RNA, 14 nt, synthetic construct
  source 1..14: mol_type = other RNA
tcagccacagcaac

SEQ ID NO: 10032 - RNA, 15 nt, synthetic construct
  source 1..15: mol_type = other RNA
tcagccacagcaacc

SEQ ID NO: 10033 - RNA, 16 nt, synthetic construct
  source 1..16: mol_type = other RNA
tcagccacagcaacca

SEQ ID NO: 10034 - RNA, 17 nt, synthetic construct
  source 1..17: mol_type = other RNA
tcagccacagcaaccac

SEQ ID NO: 10035 - RNA, 18 nt, synthetic construct
  source 1..18: mol_type = other RNA
tcagccacagcaaccacc

SEQ ID NO: 10036 - RNA, 19 nt, synthetic construct
  source 1..19: mol_type = other RNA
tcagccacagcaaccacca

SEQ ID NO: 10037 - RNA, 72 nt, synthetic construct
  source 1..72: mol_type = other RNA
cggcccagggcaatgaacacaaagagcatggggggcgtgtcgaagaatgtcacagggctcctctccgccttc

SEQ ID NO: 10038 - RNA, 73 nt, synthetic construct
  source 1..73: mol_type = other RNA
ccggcccagggcaatgaacacaaagagcatggggggcgtgtcgaagaatgtcacagggctcctctccgccttc

SEQ ID NO: 10039 - RNA, 74 nt, synthetic construct
  source 1..74: mol_type = other RNA
accggcccagggcaatgaacacaaagagcatggggggcgtgtcgaagaatgtcacagggctcctctccgccttc

SEQ ID NO: 10040 - RNA, 75 nt, synthetic construct
  source 1..75: mol_type = other RNA
caccggcccagggcaatgaacacaaagagcatggggggcgtgtcgaagaatgtcacagggctcctctccgccttc

SEQ ID NO: 10041 - RNA, 76 nt, synthetic construct
  source 1..76: mol_type = other RNA
ccaccggcccagggcaatgaacacaaagagcatggggggcgtgtcgaagaatgtcacagggctcctctccgccttc

SEQ ID NO: 10042 - RNA, 77 nt, synthetic construct
  source 1..77: mol_type = other RNA
gccaccggcccagggcaatgaacacaaagagcatggggggcgtgtcgaagaatgtcacagggctcctctccgccttc

SEQ ID NO: 10043 - RNA, 78 nt, synthetic construct
  source 1..78: mol_type = other RNA
agccaccggcccagggcaatgaacacaaagagcatggggggcgtgtcgaagaatgtcacagggctcctctccgccttc

SEQ ID NO: 10044 - RNA, 79 nt, synthetic construct
  source 1..79: mol_type = other RNA
cagccaccggcccagggcaatgaacacaaagagcatggggggcgtgtcgaagaatgtcacagggctcctctccgccttc

SEQ ID NO: 10045 - RNA, 80 nt, synthetic construct
  source 1..80: mol_type = other RNA
ccagccaccggcccagggcaatgaacacaaagagcatggggggcgtgtcgaagaatgtcacagggctcctctccgccttc

SEQ ID NO: 10046 - RNA, 81 nt, synthetic construct
  source 1..81: mol_type = other RNA
tccagccaccggcccagggcaatgaacacaaagagcatggggggcgtgtcgaagaatgtcacagggctcctctccgccttc

SEQ ID NO: 10047 - RNA, 82 nt, synthetic construct
  source 1..82: mol_type = other RNA
ttccagccaccggcccagggcaatgaacacaaagagcatggggggcgtgtcgaagaatgtcacagggctcctctccgccttc

SEQ ID NO: 10048 - RNA, 83 nt, synthetic construct
  source 1..83: mol_type = other RNA
gttccagccaccggcccagggcaatgaacacaaagagcatggggggcgtgtcgaagaatgtcacagggctcctctccgccttc

SEQ ID NO: 10049 - RNA, 84 nt, synthetic construct
  source 1..84: mol_type = other RNA
tgttccagccaccggcccagggcaatgaacacaaagagcatggggggcgtgtcgaagaatgtcacagggctcctctccgccttc

SEQ ID NO: 10050 - RNA, 85 nt, synthetic construct
  source 1..85: mol_type = other RNA
gtgttccagccaccggcccagggcaatgaacacaaagagcatggggggcgtgtcgaagaatgtcacagggctcctctccgccttc

SEQ ID NO: 10051 - RNA, 86 nt, synthetic construct
  source 1..86: mol_type = other RNA
agtgttccagccaccggcccagggcaatgaacacaaagagcatggggggcgtgtcgaagaatgtcacagggctcctctccgccttc

SEQ ID NO: 10052 - RNA, 87 nt, synthetic construct
  source 1..87: mol_type = other RNA
aagtgttccagccaccggcccagggcaatgaacacaaagagcatggggggcgtgtcgaagaatgtcacagggctcctctccgccttc

SEQ ID NO: 10053 - RNA, 88 nt, synthetic construct
  source 1..88: mol_type = other RNA
caagtgttccagccaccggcccagggcaatgaacacaaagagcatggggggcgtgtcgaagaatgtcacagggctcctctccgccttc

SEQ ID NO: 10054 - RNA, 89 nt, synthetic construct
  source 1..89: mol_type = other RNA
ccaagtgttccagccaccggcccagggcaatgaacacaaagagcatggggggcgtgtcgaagaatgtcacagggctcctctccgccttc

SEQ ID NO: 10055 - RNA, 90 nt, synthetic construct
  source 1..90: mol_type = other RNA
gccaagtgttccagccaccggcccagggcaatgaacacaaagagcatggggggcgtgtcgaagaatgtcacagggctcctctccgccttc

SEQ ID NO: 10056 - RNA, 91 nt, synthetic construct
  source 1..91: mol_type = other RNA
tgccaagtgttccagccaccggcccagggcaatgaacacaaagagcatggggggcgtgtcgaagaatgtcacagggctcctctccgccttc

SEQ ID NO: 10057 - RNA, 92 nt, synthetic construct
  source 1..92: mol_type = other RNA
ttgccaagtgttccagccaccggcccagggcaatgaacacaaagagcatggggggcgtgtcgaagaatgtcacagggctcctctccgccttc

SEQ ID NO: 10058 - RNA, 93 nt, synthetic construct
  source 1..93: mol_type = other RNA
tttgccaagtgttccagccaccggcccagggcaatgaacacaaagagcatggggggcgtgtcgaagaatgtcacagggctcctctccgccttc

SEQ ID NO: 10059 - RNA, 94 nt, synthetic construct
  source 1..94: mol_type = other RNA
ctttgccaagtgttccagccaccggcccagggcaatgaacacaaagagcatggggggcgtgtcgaagaatgtcacagggctcctctccgccttc

SEQ ID NO: 10060 - RNA, 95 nt, synthetic construct
  source 1..95: mol_type = other RNA
cctttgccaagtgttccagccaccggcccagggcaatgaacacaaagagcatggggggcgtgtcgaagaatgtcacagggctcctctccgccttc

SEQ ID NO: 10061 - RNA, 96 nt, synthetic construct
  source 1..96: mol_type = other RNA
acctttgccaagtgttccagccaccggcccagggcaatgaacacaaagagcatggggggcgtgtcgaagaatgtcacagggctcctctccgccttc

SEQ ID NO: 10062 - RNA, 97 nt, synthetic construct
  source 1..97: mol_type = other RNA
tacctttgccaagtgttccagccaccggcccagggcaatgaacacaaagagcatggggggcgtgtcgaagaatgtcacagggctcctctccgccttc

SEQ ID NO: 10063 - RNA, 98 nt, synthetic construct
  source 1..98: mol_type = other RNA
ttacctttgccaagtgttccagccaccggcccagggcaatgaacacaaagagcatggggggcgtgtcgaagaatgtcacagggctcctctccgccttc

SEQ ID NO: 10064 - RNA, 99 nt, synthetic construct
  source 1..99: mol_type = other RNA
gttacctttgccaagtgttccagccaccggcccagggcaatgaacacaaagagcatggggggcgtgtcgaagaatgtcacagggctcctctccgccttc

SEQ ID NO: 10065 - RNA, 100 nt, synthetic construct
  source 1..100: mol_type = other RNA
tgttacctttgccaagtgttccagccaccggcccagggcaatgaacacaaagagcatggggggcgtgtcgaagaatgtcacagggctcctctccgccttc

SEQ ID NO: 10066 - RNA, 16 nt, synthetic construct
  source 1..16: mol_type = other RNA
tgagaaggcggagagg

SEQ ID NO: 10067 - RNA, 17 nt, synthetic construct
  source 1..17: mol_type = other RNA
ctgagaaggcggagagg

SEQ ID NO: 10068 - RNA, 18 nt, synthetic construct
  source 1..18: mol_type = other RNA
gctgagaaggcggagagg

SEQ ID NO: 10069 - RNA, 19 nt, synthetic construct
  source 1..19: mol_type = other RNA
ggctgagaaggcggagagg

SEQ ID NO: 10070 - RNA, 20 nt, synthetic construct
  source 1..20: mol_type = other RNA
tggctgagaaggcggagagg

SEQ ID NO: 10071 - RNA, 21 nt, synthetic construct
  source 1..21: mol_type = other RNA
gtggctgagaaggcggagagg

SEQ ID NO: 10072 - RNA, 22 nt, synthetic construct
  source 1..22: mol_type = other RNA
tgtggctgagaaggcggagagg

SEQ ID NO: 10073-10079 - skipped (7 entries)

SEQ ID NO: 10080 - RNA, 10 nt, synthetic construct
  source 1..10: mol_type = other RNA
ctccgccttc

SEQ ID NO: 10081 - RNA, 11 nt, synthetic construct
  source 1..11: mol_type = other RNA
ctccgccttct

SEQ ID NO: 10082 - RNA, 12 nt, synthetic construct
  source 1..12: mol_type = other RNA
ctccgccttctc

SEQ ID NO: 10083 - RNA, 13 nt, synthetic construct
  source 1..13: mol_type = other RNA
ctccgccttctca

SEQ ID NO: 10084 - RNA, 14 nt, synthetic construct
  source 1..14: mol_type = other RNA
ctccgccttctcag

SEQ ID NO: 10085 - RNA, 15 nt, synthetic construct
  source 1..15: mol_type = other RNA
ctccgccttctcagc

SEQ ID NO: 10086 - RNA, 16 nt, synthetic construct
  source 1..16: mol_type = other RNA
ctccgccttctcagcc

SEQ ID NO: 10087 - RNA, 17 nt, synthetic construct
  source 1..17: mol_type = other RNA
ctccgccttctcagcca

SEQ ID NO: 10088 - RNA, 18 nt, synthetic construct
  source 1..18: mol_type = other RNA
ctccgccttctcagccac

SEQ ID NO: 10089 - RNA, 19 nt, synthetic construct
  source 1..19: mol_type = other RNA
ctccgccttctcagccaca

SEQ ID NO: 10090 - RNA, 62 nt, synthetic construct
  source 1..62: mol_type = other RNA
cggcccagggcaatgaacacaaagagcatggggggcgtgtcgaagaatgtcacaggagacct

SEQ ID NO: 10091 - RNA, 62 nt, synthetic construct
  source 1..62: mol_type = other RNA
cggcccagggcaatgaacacaaagagcatggggggcgtgtcgaagaatgtcacaggcgacct

SEQ ID NO: 10092 - RNA, 62 nt, synthetic construct
  source 1..62: mol_type = other RNA
cggcccagggcaatgaacacaaagagcatggggggcgtgtcgaagaatgtcacagggctcct

SEQ ID NO: 10093 - RNA, 62 nt, synthetic construct
  source 1..62: mol_type = other RNA
cggcccagggcaatgaacacaaagagcatggggggcgtgtcgaagaatgtcacaggggacct

SEQ ID NO: 10094 - RNA, 62 nt, synthetic construct
  source 1..62: mol_type = other RNA
cggcccagggcaatgaacacaaagagcatggggggcgtgtcgaagaatgtcacaggtgacct

SEQ ID NO: 10095 - RNA, 63 nt, synthetic construct
  source 1..63: mol_type = other RNA
ccggcccagggcaatgaacacaaagagcatggggggcgtgtcgaagaatgtcacaggagacct

SEQ ID NO: 10096 - RNA, 63 nt, synthetic construct
  source 1..63: mol_type = other RNA
ccggcccagggcaatgaacacaaagagcatggggggcgtgtcgaagaatgtcacaggggacct

SEQ ID NO: 10097 - RNA, 63 nt, synthetic construct
  source 1..63: mol_type = other RNA
ccggcccagggcaatgaacacaaagagcatggggggcgtgtcgaagaatgtcacaggcgacct

SEQ ID NO: 10098 - RNA, 63 nt, synthetic construct
  source 1..63: mol_type = other RNA
ccggcccagggcaatgaacacaaagagcatggggggcgtgtcgaagaatgtcacagggctcct

SEQ ID NO: 10099 - RNA, 63 nt, synthetic construct
  source 1..63: mol_type = other RNA
ccggcccagggcaatgaacacaaagagcatggggggcgtgtcgaagaatgtcacaggtgacct

SEQ ID NO: 10100 - RNA, 64 nt, synthetic construct
  source 1..64: mol_type = other RNA
accggcccagggcaatgaacacaaagagcatggggggcgtgtcgaagaatgtcacagggctcct

SEQ ID NO: 10101 - RNA, 64 nt, synthetic construct
  source 1..64: mol_type = other RNA
accggcccagggcaatgaacacaaagagcatggggggcgtgtcgaagaatgtcacaggcgacct

SEQ ID NO: 10102 - RNA, 64 nt, synthetic construct
  source 1..64: mol_type = other RNA
accggcccagggcaatgaacacaaagagcatggggggcgtgtcgaagaatgtcacaggtgacct

SEQ ID NO: 10103 - RNA, 64 nt, synthetic construct
  source 1..64: mol_type = other RNA
accggcccagggcaatgaacacaaagagcatggggggcgtgtcgaagaatgtcacaggggacct

SEQ ID NO: 10104 - RNA, 64 nt, synthetic construct
  source 1..64: mol_type = other RNA
accggcccagggcaatgaacacaaagagcatggggggcgtgtcgaagaatgtcacaggagacct

SEQ ID NO: 10105 - RNA, 65 nt, synthetic construct
  source 1..65: mol_type = other RNA
caccggcccagggcaatgaacacaaagagcatggggggcgtgtcgaagaatgtcacaggtgacct

SEQ ID NO: 10106 - RNA, 65 nt, synthetic construct
  source 1..65: mol_type = other RNA
caccggcccagggcaatgaacacaaagagcatggggggcgtgtcgaagaatgtcacaggcgacct

SEQ ID NO: 10107 - RNA, 65 nt, synthetic construct
  source 1..65: mol_type = other RNA
caccggcccagggcaatgaacacaaagagcatggggggcgtgtcgaagaatgtcacaggggacct

SEQ ID NO: 10108 - RNA, 65 nt, synthetic construct
  source 1..65: mol_type = other RNA
caccggcccagggcaatgaacacaaagagcatggggggcgtgtcgaagaatgtcacaggagacct

SEQ ID NO: 10109 - RNA, 65 nt, synthetic construct
  source 1..65: mol_type = other RNA
caccggcccagggcaatgaacacaaagagcatggggggcgtgtcgaagaatgtcacagggctcct

SEQ ID NO: 10110 - RNA, 66 nt, synthetic construct
  source 1..66: mol_type = other RNA
ccaccggcccagggcaatgaacacaaagagcatggggggcgtgtcgaagaatgtcacaggcgacct

SEQ ID NO: 10111 - RNA, 66 nt, synthetic construct
  source 1..66: mol_type = other RNA
ccaccggcccagggcaatgaacacaaagagcatggggggcgtgtcgaagaatgtcacagggctcct

SEQ ID NO: 10112 - RNA, 66 nt, synthetic construct
  source 1..66: mol_type = other RNA
ccaccggcccagggcaatgaacacaaagagcatggggggcgtgtcgaagaatgtcacaggggacct

SEQ ID NO: 10113 - RNA, 66 nt, synthetic construct
  source 1..66: mol_type = other RNA
ccaccggcccagggcaatgaacacaaagagcatggggggcgtgtcgaagaatgtcacaggagacct

SEQ ID NO: 10114 - RNA, 66 nt, synthetic construct
  source 1..66: mol_type = other RNA
ccaccggcccagggcaatgaacacaaagagcatggggggcgtgtcgaagaatgtcacaggtgacct

SEQ ID NO: 10115 - RNA, 67 nt, synthetic construct
  source 1..67: mol_type = other RNA
gccaccggcccagggcaatgaacacaaagagcatggggggcgtgtcgaagaatgtcacaggggacct

SEQ ID NO: 10116 - RNA, 67 nt, synthetic construct
  source 1..67: mol_type = other RNA
gccaccggcccagggcaatgaacacaaagagcatggggggcgtgtcgaagaatgtcacaggcgacct

SEQ ID NO: 10117 - RNA, 67 nt, synthetic construct
  source 1..67: mol_type = other RNA
gccaccggcccagggcaatgaacacaaagagcatggggggcgtgtcgaagaatgtcacaggagacct

SEQ ID NO: 10118 - RNA, 67 nt, synthetic construct
  source 1..67: mol_type = other RNA
gccaccggcccagggcaatgaacacaaagagcatggggggcgtgtcgaagaatgtcacaggtgacct

SEQ ID NO: 10119 - RNA, 67 nt, synthetic construct
  source 1..67: mol_type = other RNA
gccaccggcccagggcaatgaacacaaagagcatggggggcgtgtcgaagaatgtcacagggctcct

SEQ ID NO: 10120 - RNA, 68 nt, synthetic construct
  source 1..68: mol_type = other RNA
agccaccggcccagggcaatgaacacaaagagcatggggggcgtgtcgaagaatgtcacagggctcct

SEQ ID NO: 10121 - RNA, 68 nt, synthetic construct
  source 1..68: mol_type = other RNA
agccaccggcccagggcaatgaacacaaagagcatggggggcgtgtcgaagaatgtcacaggtgacct

SEQ ID NO: 10122 - RNA, 68 nt, synthetic construct
  source 1..68: mol_type = other RNA
agccaccggcccagggcaatgaacacaaagagcatggggggcgtgtcgaagaatgtcacaggcgacct

SEQ ID NO: 10123 - RNA, 68 nt, synthetic construct
  source 1..68: mol_type = other RNA
agccaccggcccagggcaatgaacacaaagagcatggggggcgtgtcgaagaatgtcacaggggacct

SEQ ID NO: 10124 - RNA, 68 nt, synthetic construct
  source 1..68: mol_type = other RNA
agccaccggcccagggcaatgaacacaaagagcatggggggcgtgtcgaagaatgtcacaggagacct

SEQ ID NO: 10125 - RNA, 69 nt, synthetic construct
  source 1..69: mol_type = other RNA
cagccaccggcccagggcaatgaacacaaagagcatggggggcgtgtcgaagaatgtcacaggggacct

SEQ ID NO: 10126 - RNA, 69 nt, synthetic construct
  source 1..69: mol_type = other RNA
cagccaccggcccagggcaatgaacacaaagagcatggggggcgtgtcgaagaatgtcacagggctcct

SEQ ID NO: 10127 - RNA, 69 nt, synthetic construct
  source 1..69: mol_type = other RNA
cagccaccggcccagggcaatgaacacaaagagcatggggggcgtgtcgaagaatgtcacaggagacct

SEQ ID NO: 10128 - RNA, 69 nt, synthetic construct
  source 1..69: mol_type = other RNA
cagccaccggcccagggcaatgaacacaaagagcatggggggcgtgtcgaagaatgtcacaggcgacct

SEQ ID NO: 10129 - RNA, 69 nt, synthetic construct
  source 1..69: mol_type = other RNA
cagccaccggcccagggcaatgaacacaaagagcatggggggcgtgtcgaagaatgtcacaggtgacct

SEQ ID NO: 10130 - RNA, 70 nt, synthetic construct
  source 1..70: mol_type = other RNA
ccagccaccggcccagggcaatgaacacaaagagcatggggggcgtgtcgaagaatgtcacaggggacct

SEQ ID NO: 10131 - RNA, 70 nt, synthetic construct
  source 1..70: mol_type = other RNA
ccagccaccggcccagggcaatgaacacaaagagcatggggggcgtgtcgaagaatgtcacagggctcct

SEQ ID NO: 10132 - RNA, 70 nt, synthetic construct
  source 1..70: mol_type = other RNA
ccagccaccggcccagggcaatgaacacaaagagcatggggggcgtgtcgaagaatgtcacaggagacct

SEQ ID NO: 10133 - RNA, 70 nt, synthetic construct
  source 1..70: mol_type = other RNA
ccagccaccggcccagggcaatgaacacaaagagcatggggggcgtgtcgaagaatgtcacaggcgacct

SEQ ID NO: 10134 - RNA, 70 nt, synthetic construct
  source 1..70: mol_type = other RNA
ccagccaccggcccagggcaatgaacacaaagagcatggggggcgtgtcgaagaatgtcacaggtgacct

SEQ ID NO: 10135 - RNA, 71 nt, synthetic construct
  source 1..71: mol_type = other RNA
tccagccaccggcccagggcaatgaacacaaagagcatggggggcgtgtcgaagaatgtcacaggggacct

SEQ ID NO: 10136 - RNA, 71 nt, synthetic construct
  source 1..71: mol_type = other RNA
tccagccaccggcccagggcaatgaacacaaagagcatggggggcgtgtcgaagaatgtcacaggcgacct

SEQ ID NO: 10137 - RNA, 71 nt, synthetic construct
  source 1..71: mol_type = other RNA
tccagccaccggcccagggcaatgaacacaaagagcatggggggcgtgtcgaagaatgtcacaggagacct

SEQ ID NO: 10138 - RNA, 71 nt, synthetic construct
  source 1..71: mol_type = other RNA
tccagccaccggcccagggcaatgaacacaaagagcatggggggcgtgtcgaagaatgtcacagggctcct

SEQ ID NO: 10139 - RNA, 71 nt, synthetic construct
  source 1..71: mol_type = other RNA
tccagccaccggcccagggcaatgaacacaaagagcatggggggcgtgtcgaagaatgtcacaggtgacct

SEQ ID NO: 10140 - RNA, 72 nt, synthetic construct
  source 1..72: mol_type = other RNA
ttccagccaccggcccagggcaatgaacacaaagagcatggggggcgtgtcgaagaatgtcacaggagacct

SEQ ID NO: 10141 - RNA, 72 nt, synthetic construct
  source 1..72: mol_type = other RNA
ttccagccaccggcccagggcaatgaacacaaagagcatggggggcgtgtcgaagaatgtcacaggtgacct

SEQ ID NO: 10142 - RNA, 72 nt, synthetic construct
  source 1..72: mol_type = other RNA
ttccagccaccggcccagggcaatgaacacaaagagcatggggggcgtgtcgaagaatgtcacaggcgacct

SEQ ID NO: 10143 - RNA, 72 nt, synthetic construct
  source 1..72: mol_type = other RNA
ttccagccaccggcccagggcaatgaacacaaagagcatggggggcgtgtcgaagaatgtcacaggggacct

SEQ ID NO: 10144 - RNA, 72 nt, synthetic construct
  source 1..72: mol_type = other RNA
ttccagccaccggcccagggcaatgaacacaaagagcatggggggcgtgtcgaagaatgtcacagggctcct

SEQ ID NO: 10145 - RNA, 73 nt, synthetic construct
  source 1..73: mol_type = other RNA
gttccagccaccggcccagggcaatgaacacaaagagcatggggggcgtgtcgaagaatgtcacagggctcct

SEQ ID NO: 10146 - RNA, 73 nt, synthetic construct
  source 1..73: mol_type = other RNA
gttccagccaccggcccagggcaatgaacacaaagagcatggggggcgtgtcgaagaatgtcacaggtgacct

SEQ ID NO: 10147 - RNA, 73 nt, synthetic construct
  source 1..73: mol_type = other RNA
gttccagccaccggcccagggcaatgaacacaaagagcatggggggcgtgtcgaagaatgtcacaggggacct

SEQ ID NO: 10148 - RNA, 73 nt, synthetic construct
  source 1..73: mol_type = other RNA
gttccagccaccggcccagggcaatgaacacaaagagcatggggggcgtgtcgaagaatgtcacaggagacct

SEQ ID NO: 10149 - RNA, 73 nt, synthetic construct
  source 1..73: mol_type = other RNA
gttccagccaccggcccagggcaatgaacacaaagagcatggggggcgtgtcgaagaatgtcacaggcgacct

SEQ ID NO: 10150 - RNA, 74 nt, synthetic construct
  source 1..74: mol_type = other RNA
tgttccagccaccggcccagggcaatgaacacaaagagcatggggggcgtgtcgaagaatgtcacaggagacct

SEQ ID NO: 10151 - RNA, 74 nt, synthetic construct
  source 1..74: mol_type = other RNA
tgttccagccaccggcccagggcaatgaacacaaagagcatggggggcgtgtcgaagaatgtcacagggctcct

SEQ ID NO: 10152 - RNA, 74 nt, synthetic construct
  source 1..74: mol_type = other RNA
tgttccagccaccggcccagggcaatgaacacaaagagcatggggggcgtgtcgaagaatgtcacaggtgacct

SEQ ID NO: 10153 - RNA, 74 nt, synthetic construct
  source 1..74: mol_type = other RNA
tgttccagccaccggcccagggcaatgaacacaaagagcatggggggcgtgtcgaagaatgtcacaggggacct

SEQ ID NO: 10154 - RNA, 74 nt, synthetic construct
  source 1..74: mol_type = other RNA
tgttccagccaccggcccagggcaatgaacacaaagagcatggggggcgtgtcgaagaatgtcacaggcgacct

SEQ ID NO: 10155 - RNA, 75 nt, synthetic construct
  source 1..75: mol_type = other RNA
gtgttccagccaccggcccagggcaatgaacacaaagagcatggggggcgtgtcgaagaatgtcacaggggacct

SEQ ID NO: 10156 - RNA, 75 nt, synthetic construct
  source 1..75: mol_type = other RNA
gtgttccagccaccggcccagggcaatgaacacaaagagcatggggggcgtgtcgaagaatgtcacaggagacct

SEQ ID NO: 10157 - RNA, 75 nt, synthetic construct
  source 1..75: mol_type = other RNA
gtgttccagccaccggcccagggcaatgaacacaaagagcatggggggcgtgtcgaagaatgtcacaggtgacct

SEQ ID NO: 10158 - RNA, 75 nt, synthetic construct
  source 1..75: mol_type = other RNA
gtgttccagccaccggcccagggcaatgaacacaaagagcatggggggcgtgtcgaagaatgtcacaggcgacct

SEQ ID NO: 10159 - RNA, 75 nt, synthetic construct
  source 1..75: mol_type = other RNA
gtgttccagccaccggcccagggcaatgaacacaaagagcatggggggcgtgtcgaagaatgtcacagggctcct

SEQ ID NO: 10160 - RNA, 76 nt, synthetic construct
  source 1..76: mol_type = other RNA
agtgttccagccaccggcccagggcaatgaacacaaagagcatggggggcgtgtcgaagaatgtcacaggcgacct

SEQ ID NO: 10161 - RNA, 76 nt, synthetic construct
  source 1..76: mol_type = other RNA
agtgttccagccaccggcccagggcaatgaacacaaagagcatggggggcgtgtcgaagaatgtcacaggggacct

SEQ ID NO: 10162 - RNA, 76 nt, synthetic construct
  source 1..76: mol_type = other RNA
agtgttccagccaccggcccagggcaatgaacacaaagagcatggggggcgtgtcgaagaatgtcacagggctcct

SEQ ID NO: 10163 - RNA, 76 nt, synthetic construct
  source 1..76: mol_type = other RNA
agtgttccagccaccggcccagggcaatgaacacaaagagcatggggggcgtgtcgaagaatgtcacaggagacct

SEQ ID NO: 10164 - RNA, 76 nt, synthetic construct
  source 1..76: mol_type = other RNA
agtgttccagccaccggcccagggcaatgaacacaaagagcatggggggcgtgtcgaagaatgtcacaggtgacct

SEQ ID NO: 10165 - RNA, 77 nt, synthetic construct
  source 1..77: mol_type = other RNA
aagtgttccagccaccggcccagggcaatgaacacaaagagcatggggggcgtgtcgaagaatgtcacaggggacct

SEQ ID NO: 10166 - RNA, 77 nt, synthetic construct
  source 1..77: mol_type = other RNA
aagtgttccagccaccggcccagggcaatgaacacaaagagcatggggggcgtgtcgaagaatgtcacagggctcct

SEQ ID NO: 10167 - RNA, 77 nt, synthetic construct
  source 1..77: mol_type = other RNA
aagtgttccagccaccggcccagggcaatgaacacaaagagcatggggggcgtgtcgaagaatgtcacaggtgacct

SEQ ID NO: 10168 - RNA, 77 nt, synthetic construct
  source 1..77: mol_type = other RNA
aagtgttccagccaccggcccagggcaatgaacacaaagagcatggggggcgtgtcgaagaatgtcacaggagacct

SEQ ID NO: 10169 - RNA, 77 nt, synthetic construct
  source 1..77: mol_type = other RNA
aagtgttccagccaccggcccagggcaatgaacacaaagagcatggggggcgtgtcgaagaatgtcacaggcgacct

SEQ ID NO: 10170 - RNA, 78 nt, synthetic construct
  source 1..78: mol_type = other RNA
caagtgttccagccaccggcccagggcaatgaacacaaagagcatggggggcgtgtcgaagaatgtcacagggctcct

SEQ ID NO: 10171 - RNA, 78 nt, synthetic construct
  source 1..78: mol_type = other RNA
caagtgttccagccaccggcccagggcaatgaacacaaagagcatggggggcgtgtcgaagaatgtcacaggagacct

SEQ ID NO: 10172 - RNA, 78 nt, synthetic construct
  source 1..78: mol_type = other RNA
caagtgttccagccaccggcccagggcaatgaacacaaagagcatggggggcgtgtcgaagaatgtcacaggcgacct

SEQ ID NO: 10173 - RNA, 78 nt, synthetic construct
  source 1..78: mol_type = other RNA
caagtgttccagccaccggcccagggcaatgaacacaaagagcatggggggcgtgtcgaagaatgtcacaggggacct

SEQ ID NO: 10174 - RNA, 78 nt, synthetic construct
  source 1..78: mol_type = other RNA
caagtgttccagccaccggcccagggcaatgaacacaaagagcatggggggcgtgtcgaagaatgtcacaggtgacct

SEQ ID NO: 10175 - RNA, 79 nt, synthetic construct
  source 1..79: mol_type = other RNA
ccaagtgttccagccaccggcccagggcaatgaacacaaagagcatggggggcgtgtcgaagaatgtcacaggcgacct

SEQ ID NO: 10176 - RNA, 79 nt, synthetic construct
  source 1..79: mol_type = other RNA
ccaagtgttccagccaccggcccagggcaatgaacacaaagagcatggggggcgtgtcgaagaatgtcacaggggacct

SEQ ID NO: 10177 - RNA, 79 nt, synthetic construct
  source 1..79: mol_type = other RNA
ccaagtgttccagccaccggcccagggcaatgaacacaaagagcatggggggcgtgtcgaagaatgtcacaggtgacct

SEQ ID NO: 10178 - RNA, 79 nt, synthetic construct
  source 1..79: mol_type = other RNA
ccaagtgttccagccaccggcccagggcaatgaacacaaagagcatggggggcgtgtcgaagaatgtcacagggctcct

SEQ ID NO: 10179 - RNA, 79 nt, synthetic construct
  source 1..79: mol_type = other RNA
ccaagtgttccagccaccggcccagggcaatgaacacaaagagcatggggggcgtgtcgaagaatgtcacaggagacct

SEQ ID NO: 10180 - RNA, 80 nt, synthetic construct
  source 1..80: mol_type = other RNA
gccaagtgttccagccaccggcccagggcaatgaacacaaagagcatggggggcgtgtcgaagaatgtcacaggtgacct

SEQ ID NO: 10181 - RNA, 80 nt, synthetic construct
  source 1..80: mol_type = other RNA
gccaagtgttccagccaccggcccagggcaatgaacacaaagagcatggggggcgtgtcgaagaatgtcacagggctcct

SEQ ID NO: 10182 - RNA, 80 nt, synthetic construct
  source 1..80: mol_type = other RNA
gccaagtgttccagccaccggcccagggcaatgaacacaaagagcatggggggcgtgtcgaagaatgtcacaggagacct

SEQ ID NO: 10183 - RNA, 80 nt, synthetic construct
  source 1..80: mol_type = other RNA
gccaagtgttccagccaccggcccagggcaatgaacacaaagagcatggggggcgtgtcgaagaatgtcacaggcgacct

SEQ ID NO: 10184 - RNA, 80 nt, synthetic construct
  source 1..80: mol_type = other RNA
gccaagtgttccagccaccggcccagggcaatgaacacaaagagcatggggggcgtgtcgaagaatgtcacaggggacct

SEQ ID NO: 10185 - RNA, 81 nt, synthetic construct
  source 1..81: mol_type = other RNA
tgccaagtgttccagccaccggcccagggcaatgaacacaaagagcatggggggcgtgtcgaagaatgtcacaggagacct

SEQ ID NO: 10186 - RNA, 81 nt, synthetic construct
  source 1..81: mol_type = other RNA
tgccaagtgttccagccaccggcccagggcaatgaacacaaagagcatggggggcgtgtcgaagaatgtcacagggctcct

SEQ ID NO: 10187 - RNA, 81 nt, synthetic construct
  source 1..81: mol_type = other RNA
tgccaagtgttccagccaccggcccagggcaatgaacacaaagagcatggggggcgtgtcgaagaatgtcacaggcgacct

SEQ ID NO: 10188 - RNA, 81 nt, synthetic construct
  source 1..81: mol_type = other RNA
tgccaagtgttccagccaccggcccagggcaatgaacacaaagagcatggggggcgtgtcgaagaatgtcacaggggacct

SEQ ID NO: 10189 - RNA, 81 nt, synthetic construct
  source 1..81: mol_type = other RNA
tgccaagtgttccagccaccggcccagggcaatgaacacaaagagcatggggggcgtgtcgaagaatgtcacaggtgacct

SEQ ID NO: 10190 - RNA, 82 nt, synthetic construct
  source 1..82: mol_type = other RNA
ttgccaagtgttccagccaccggcccagggcaatgaacacaaagagcatggggggcgtgtcgaagaatgtcacagggctcct

SEQ ID NO: 10191 - RNA, 82 nt, synthetic construct
  source 1..82: mol_type = other RNA
ttgccaagtgttccagccaccggcccagggcaatgaacacaaagagcatggggggcgtgtcgaagaatgtcacaggggacct

SEQ ID NO: 10192 - RNA, 82 nt, synthetic construct
  source 1..82: mol_type = other RNA
ttgccaagtgttccagccaccggcccagggcaatgaacacaaagagcatggggggcgtgtcgaagaatgtcacaggagacct

SEQ ID NO: 10193 - RNA, 82 nt, synthetic construct
  source 1..82: mol_type = other RNA
ttgccaagtgttccagccaccggcccagggcaatgaacacaaagagcatggggggcgtgtcgaagaatgtcacaggcgacct

SEQ ID NO: 10194 - RNA, 82 nt, synthetic construct
  source 1..82: mol_type = other RNA
ttgccaagtgttccagccaccggcccagggcaatgaacacaaagagcatggggggcgtgtcgaagaatgtcacaggtgacct

SEQ ID NO: 10195 - RNA, 83 nt, synthetic construct
  source 1..83: mol_type = other RNA
tttgccaagtgttccagccaccggcccagggcaatgaacacaaagagcatggggggcgtgtcgaagaatgtcacaggggacct

SEQ ID NO: 10196 - RNA, 83 nt, synthetic construct
  source 1..83: mol_type = other RNA
tttgccaagtgttccagccaccggcccagggcaatgaacacaaagagcatggggggcgtgtcgaagaatgtcacaggagacct

SEQ ID NO: 10197 - RNA, 83 nt, synthetic construct
  source 1..83: mol_type = other RNA
tttgccaagtgttccagccaccggcccagggcaatgaacacaaagagcatggggggcgtgtcgaagaatgtcacaggcgacct

SEQ ID NO: 10198 - RNA, 83 nt, synthetic construct
  source 1..83: mol_type = other RNA
tttgccaagtgttccagccaccggcccagggcaatgaacacaaagagcatggggggcgtgtcgaagaatgtcacaggtgacct

SEQ ID NO: 10199 - RNA, 83 nt, synthetic construct
  source 1..83: mol_type = other RNA
tttgccaagtgttccagccaccggcccagggcaatgaacacaaagagcatggggggcgtgtcgaagaatgtcacagggctcct

SEQ ID NO: 10200 - RNA, 84 nt, synthetic construct
  source 1..84: mol_type = other RNA
ctttgccaagtgttccagccaccggcccagggcaatgaacacaaagagcatggggggcgtgtcgaagaatgtcacaggggacct

SEQ ID NO: 10201 - RNA, 84 nt, synthetic construct
  source 1..84: mol_type = other RNA
ctttgccaagtgttccagccaccggcccagggcaatgaacacaaagagcatggggggcgtgtcgaagaatgtcacaggcgacct

SEQ ID NO: 10202 - RNA, 84 nt, synthetic construct
  source 1..84: mol_type = other RNA
ctttgccaagtgttccagccaccggcccagggcaatgaacacaaagagcatggggggcgtgtcgaagaatgtcacaggagacct

SEQ ID NO: 10203 - RNA, 84 nt, synthetic construct
  source 1..84: mol_type = other RNA
ctttgccaagtgttccagccaccggcccagggcaatgaacacaaagagcatggggggcgtgtcgaagaatgtcacaggtgacct

SEQ ID NO: 10204 - RNA, 84 nt, synthetic construct
  source 1..84: mol_type = other RNA
ctttgccaagtgttccagccaccggcccagggcaatgaacacaaagagcatggggggcgtgtcgaagaatgtcacagggctcct

SEQ ID NO: 10205 - RNA, 85 nt, synthetic construct
  source 1..85: mol_type = other RNA
cctttgccaagtgttccagccaccggcccagggcaatgaacacaaagagcatggggggcgtgtcgaagaatgtcacaggagacct

SEQ ID NO: 10206 - RNA, 85 nt, synthetic construct
  source 1..85: mol_type = other RNA
cctttgccaagtgttccagccaccggcccagggcaatgaacacaaagagcatggggggcgtgtcgaagaatgtcacagggctcct

SEQ ID NO: 10207 - RNA, 85 nt, synthetic construct
  source 1..85: mol_type = other RNA
cctttgccaagtgttccagccaccggcccagggcaatgaacacaaagagcatggggggcgtgtcgaagaatgtcacaggtgacct

SEQ ID NO: 10208 - RNA, 85 nt, synthetic construct
  source 1..85: mol_type = other RNA
cctttgccaagtgttccagccaccggcccagggcaatgaacacaaagagcatggggggcgtgtcgaagaatgtcacaggggacct

SEQ ID NO: 10209 - RNA, 85 nt, synthetic construct
  source 1..85: mol_type = other RNA
cctttgccaagtgttccagccaccggcccagggcaatgaacacaaagagcatggggggcgtgtcgaagaatgtcacaggcgacct

SEQ ID NO: 10210 - RNA, 86 nt, synthetic construct
  source 1..86: mol_type = other RNA
acctttgccaagtgttccagccaccggcccagggcaatgaacacaaagagcatggggggcgtgtcgaagaatgtcacagggctcct

SEQ ID NO: 10211 - RNA, 86 nt, synthetic construct
  source 1..86: mol_type = other RNA
acctttgccaagtgttccagccaccggcccagggcaatgaacacaaagagcatggggggcgtgtcgaagaatgtcacaggagacct

SEQ ID NO: 10212 - RNA, 86 nt, synthetic construct
  source 1..86: mol_type = other RNA
acctttgccaagtgttccagccaccggcccagggcaatgaacacaaagagcatggggggcgtgtcgaagaatgtcacaggggacct

SEQ ID NO: 10213 - RNA, 86 nt, synthetic construct
  source 1..86: mol_type = other RNA
acctttgccaagtgttccagccaccggcccagggcaatgaacacaaagagcatggggggcgtgtcgaagaatgtcacaggcgacct

SEQ ID NO: 10214 - RNA, 86 nt, synthetic construct
  source 1..86: mol_type = other RNA
acctttgccaagtgttccagccaccggcccagggcaatgaacacaaagagcatggggggcgtgtcgaagaatgtcacaggtgacct

SEQ ID NO: 10215 - RNA, 87 nt, synthetic construct
  source 1..87: mol_type = other RNA
tacctttgccaagtgttccagccaccggcccagggcaatgaacacaaagagcatggggggcgtgtcgaagaatgtcacaggggacct

SEQ ID NO: 10216 - RNA, 87 nt, synthetic construct
  source 1..87: mol_type = other RNA
tacctttgccaagtgttccagccaccggcccagggcaatgaacacaaagagcatggggggcgtgtcgaagaatgtcacaggtgacct

SEQ ID NO: 10217 - RNA, 87 nt, synthetic construct
  source 1..87: mol_type = other RNA
tacctttgccaagtgttccagccaccggcccagggcaatgaacacaaagagcatggggggcgtgtcgaagaatgtcacaggcgacct

SEQ ID NO: 10218 - RNA, 87 nt, synthetic construct
  source 1..87: mol_type = other RNA
tacctttgccaagtgttccagccaccggcccagggcaatgaacacaaagagcatggggggcgtgtcgaagaatgtcacagggctcct

SEQ ID NO: 10219 - RNA, 87 nt, synthetic construct
  source 1..87: mol_type = other RNA
tacctttgccaagtgttccagccaccggcccagggcaatgaacacaaagagcatggggggcgtgtcgaagaatgtcacaggagacct

SEQ ID NO: 10220 - RNA, 88 nt, synthetic construct
  source 1..88: mol_type = other RNA
ttacctttgccaagtgttccagccaccggcccagggcaatgaacacaaagagcatggggggcgtgtcgaagaatgtcacaggagacct

SEQ ID NO: 10221 - RNA, 88 nt, synthetic construct
  source 1..88: mol_type = other RNA
ttacctttgccaagtgttccagccaccggcccagggcaatgaacacaaagagcatggggggcgtgtcgaagaatgtcacaggggacct

SEQ ID NO: 10222 - RNA, 88 nt, synthetic construct
  source 1..88: mol_type = other RNA
ttacctttgccaagtgttccagccaccggcccagggcaatgaacacaaagagcatggggggcgtgtcgaagaatgtcacaggcgacct

SEQ ID NO: 10223 - RNA, 88 nt, synthetic construct
  source 1..88: mol_type = other RNA
ttacctttgccaagtgttccagccaccggcccagggcaatgaacacaaagagcatggggggcgtgtcgaagaatgtcacagggctcct

SEQ ID NO: 10224 - RNA, 88 nt, synthetic construct
  source 1..88: mol_type = other RNA
ttacctttgccaagtgttccagccaccggcccagggcaatgaacacaaagagcatggggggcgtgtcgaagaatgtcacaggtgacct

SEQ ID NO: 10225 - RNA, 89 nt, synthetic construct
  source 1..89: mol_type = other RNA
gttacctttgccaagtgttccagccaccggcccagggcaatgaacacaaagagcatggggggcgtgtcgaagaatgtcacaggggacct

SEQ ID NO: 10226 - RNA, 89 nt, synthetic construct
  source 1..89: mol_type = other RNA
gttacctttgccaagtgttccagccaccggcccagggcaatgaacacaaagagcatggggggcgtgtcgaagaatgtcacagggctcct

SEQ ID NO: 10227 - RNA, 89 nt, synthetic construct
  source 1..89: mol_type = other RNA
gttacctttgccaagtgttccagccaccggcccagggcaatgaacacaaagagcatggggggcgtgtcgaagaatgtcacaggtgacct

SEQ ID NO: 10228 - RNA, 89 nt, synthetic construct
  source 1..89: mol_type = other RNA
gttacctttgccaagtgttccagccaccggcccagggcaatgaacacaaagagcatggggggcgtgtcgaagaatgtcacaggcgacct

SEQ ID NO: 10229 - RNA, 89 nt, synthetic construct
  source 1..89: mol_type = other RNA
gttacctttgccaagtgttccagccaccggcccagggcaatgaacacaaagagcatggggggcgtgtcgaagaatgtcacaggagacct

SEQ ID NO: 10230 - RNA, 90 nt, synthetic construct
  source 1..90: mol_type = other RNA
tgttacctttgccaagtgttccagccaccggcccagggcaatgaacacaaagagcatggggggcgtgtcgaagaatgtcacaggggacct

SEQ ID NO: 10231 - RNA, 90 nt, synthetic construct
  source 1..90: mol_type = other RNA
tgttacctttgccaagtgttccagccaccggcccagggcaatgaacacaaagagcatggggggcgtgtcgaagaatgtcacaggtgacct

SEQ ID NO: 10232 - RNA, 90 nt, synthetic construct
  source 1..90: mol_type = other RNA
tgttacctttgccaagtgttccagccaccggcccagggcaatgaacacaaagagcatggggggcgtgtcgaagaatgtcacaggcgacct

SEQ ID NO: 10233 - RNA, 90 nt, synthetic construct
  source 1..90: mol_type = other RNA
tgttacctttgccaagtgttccagccaccggcccagggcaatgaacacaaagagcatggggggcgtgtcgaagaatgtcacagggctcct

SEQ ID NO: 10234 - RNA, 90 nt, synthetic construct
  source 1..90: mol_type = other RNA
tgttacctttgccaagtgttccagccaccggcccagggcaatgaacacaaagagcatggggggcgtgtcgaagaatgtcacaggagacct

SEQ ID NO: 10235 - RNA, 91 nt, synthetic construct
  source 1..91: mol_type = other RNA
ctgttacctttgccaagtgttccagccaccggcccagggcaatgaacacaaagagcatggggggcgtgtcgaagaatgtcacagggctcct

SEQ ID NO: 10236 - RNA, 91 nt, synthetic construct
  source 1..91: mol_type = other RNA
ctgttacctttgccaagtgttccagccaccggcccagggcaatgaacacaaagagcatggggggcgtgtcgaagaatgtcacaggggacct

SEQ ID NO: 10237 - RNA, 91 nt, synthetic construct
  source 1..91: mol_type = other RNA
ctgttacctttgccaagtgttccagccaccggcccagggcaatgaacacaaagagcatggggggcgtgtcgaagaatgtcacaggtgacct

SEQ ID NO: 10238 - RNA, 91 nt, synthetic construct
  source 1..91: mol_type = other RNA
ctgttacctttgccaagtgttccagccaccggcccagggcaatgaacacaaagagcatggggggcgtgtcgaagaatgtcacaggcgacct

SEQ ID NO: 10239 - RNA, 91 nt, synthetic construct
  source 1..91: mol_type = other RNA
ctgttacctttgccaagtgttccagccaccggcccagggcaatgaacacaaagagcatggggggcgtgtcgaagaatgtcacaggagacct

SEQ ID NO: 10240 - RNA, 92 nt, synthetic construct
  source 1..92: mol_type = other RNA
gctgttacctttgccaagtgttccagccaccggcccagggcaatgaacacaaagagcatggggggcgtgtcgaagaatgtcacaggggacct

SEQ ID NO: 10241 - RNA, 92 nt, synthetic construct
  source 1..92: mol_type = other RNA
gctgttacctttgccaagtgttccagccaccggcccagggcaatgaacacaaagagcatggggggcgtgtcgaagaatgtcacaggcgacct

SEQ ID NO: 10242 - RNA, 92 nt, synthetic construct
  source 1..92: mol_type = other RNA
gctgttacctttgccaagtgttccagccaccggcccagggcaatgaacacaaagagcatggggggcgtgtcgaagaatgtcacagggctcct

SEQ ID NO: 10243 - RNA, 92 nt, synthetic construct
  source 1..92: mol_type = other RNA
gctgttacctttgccaagtgttccagccaccggcccagggcaatgaacacaaagagcatggggggcgtgtcgaagaatgtcacaggagacct

SEQ ID NO: 10244 - RNA, 92 nt, synthetic construct
  source 1..92: mol_type = other RNA
gctgttacctttgccaagtgttccagccaccggcccagggcaatgaacacaaagagcatggggggcgtgtcgaagaatgtcacaggtgacct

SEQ ID NO: 10245 - RNA, 93 nt, synthetic construct
  source 1..93: mol_type = other RNA
tgctgttacctttgccaagtgttccagccaccggcccagggcaatgaacacaaagagcatggggggcgtgtcgaagaatgtcacaggagacct

SEQ ID NO: 10246 - RNA, 93 nt, synthetic construct
  source 1..93: mol_type = other RNA
tgctgttacctttgccaagtgttccagccaccggcccagggcaatgaacacaaagagcatggggggcgtgtcgaagaatgtcacaggcgacct

SEQ ID NO: 10247 - RNA, 93 nt, synthetic construct
  source 1..93: mol_type = other RNA
tgctgttacctttgccaagtgttccagccaccggcccagggcaatgaacacaaagagcatggggggcgtgtcgaagaatgtcacaggggacct

SEQ ID NO: 10248 - RNA, 93 nt, synthetic construct
  source 1..93: mol_type = other RNA
tgctgttacctttgccaagtgttccagccaccggcccagggcaatgaacacaaagagcatggggggcgtgtcgaagaatgtcacaggtgacct

SEQ ID NO: 10249 - RNA, 93 nt, synthetic construct
  source 1..93: mol_type = other RNA
tgctgttacctttgccaagtgttccagccaccggcccagggcaatgaacacaaagagcatggggggcgtgtcgaagaatgtcacagggctcct

SEQ ID NO: 10250 - RNA, 94 nt, synthetic construct
  source 1..94: mol_type = other RNA
ctgctgttacctttgccaagtgttccagccaccggcccagggcaatgaacacaaagagcatggggggcgtgtcgaagaatgtcacaggagacct

SEQ ID NO: 10251 - RNA, 94 nt, synthetic construct
  source 1..94: mol_type = other RNA
ctgctgttacctttgccaagtgttccagccaccggcccagggcaatgaacacaaagagcatggggggcgtgtcgaagaatgtcacagggctcct

SEQ ID NO: 10252 - RNA, 94 nt, synthetic construct
  source 1..94: mol_type = other RNA
ctgctgttacctttgccaagtgttccagccaccggcccagggcaatgaacacaaagagcatggggggcgtgtcgaagaatgtcacaggcgacct

SEQ ID NO: 10253 - RNA, 94 nt, synthetic construct
  source 1..94: mol_type = other RNA
ctgctgttacctttgccaagtgttccagccaccggcccagggcaatgaacacaaagagcatggggggcgtgtcgaagaatgtcacaggggacct

SEQ ID NO: 10254 - RNA, 94 nt, synthetic construct
  source 1..94: mol_type = other RNA
ctgctgttacctttgccaagtgttccagccaccggcccagggcaatgaacacaaagagcatggggggcgtgtcgaagaatgtcacaggtgacct

SEQ ID NO: 10255 - RNA, 95 nt, synthetic construct
  source 1..95: mol_type = other RNA
gctgctgttacctttgccaagtgttccagccaccggcccagggcaatgaacacaaagagcatggggggcgtgtcgaagaatgtcacaggtgacct

SEQ ID NO: 10256 - RNA, 95 nt, synthetic construct
  source 1..95: mol_type = other RNA
gctgctgttacctttgccaagtgttccagccaccggcccagggcaatgaacacaaagagcatggggggcgtgtcgaagaatgtcacagggctcct

SEQ ID NO: 10257 - RNA, 95 nt, synthetic construct
  source 1..95: mol_type = other RNA
gctgctgttacctttgccaagtgttccagccaccggcccagggcaatgaacacaaagagcatggggggcgtgtcgaagaatgtcacaggcgacct

SEQ ID NO: 10258 - RNA, 95 nt, synthetic construct
  source 1..95: mol_type = other RNA
gctgctgttacctttgccaagtgttccagccaccggcccagggcaatgaacacaaagagcatggggggcgtgtcgaagaatgtcacaggggacct

SEQ ID NO: 10259 - RNA, 95 nt, synthetic construct
  source 1..95: mol_type = other RNA
gctgctgttacctttgccaagtgttccagccaccggcccagggcaatgaacacaaagagcatggggggcgtgtcgaagaatgtcacaggagacct

SEQ ID NO: 10260 - RNA, 96 nt, synthetic construct
  source 1..96: mol_type = other RNA
agctgctgttacctttgccaagtgttccagccaccggcccagggcaatgaacacaaagagcatggggggcgtgtcgaagaatgtcacaggggacct

SEQ ID NO: 10261 - RNA, 96 nt, synthetic construct
  source 1..96: mol_type = other RNA
agctgctgttacctttgccaagtgttccagccaccggcccagggcaatgaacacaaagagcatggggggcgtgtcgaagaatgtcacaggagacct

SEQ ID NO: 10262 - RNA, 96 nt, synthetic construct
  source 1..96: mol_type = other RNA
agctgctgttacctttgccaagtgttccagccaccggcccagggcaatgaacacaaagagcatggggggcgtgtcgaagaatgtcacaggtgacct

SEQ ID NO: 10263 - RNA, 96 nt, synthetic construct
  source 1..96: mol_type = other RNA
agctgctgttacctttgccaagtgttccagccaccggcccagggcaatgaacacaaagagcatggggggcgtgtcgaagaatgtcacaggcgacct

SEQ ID NO: 10264 - RNA, 96 nt, synthetic construct
  source 1..96: mol_type = other RNA
agctgctgttacctttgccaagtgttccagccaccggcccagggcaatgaacacaaagagcatggggggcgtgtcgaagaatgtcacagggctcct

SEQ ID NO: 10265 - RNA, 97 nt, synthetic construct
  source 1..97: mol_type = other RNA
aagctgctgttacctttgccaagtgttccagccaccggcccagggcaatgaacacaaagagcatggggggcgtgtcgaagaatgtcacaggagacct

SEQ ID NO: 10266 - RNA, 97 nt, synthetic construct
  source 1..97: mol_type = other RNA
aagctgctgttacctttgccaagtgttccagccaccggcccagggcaatgaacacaaagagcatggggggcgtgtcgaagaatgtcacagggctcct

SEQ ID NO: 10267 - RNA, 97 nt, synthetic construct
  source 1..97: mol_type = other RNA
aagctgctgttacctttgccaagtgttccagccaccggcccagggcaatgaacacaaagagcatggggggcgtgtcgaagaatgtcacaggggacct

SEQ ID NO: 10268 - RNA, 97 nt, synthetic construct
  source 1..97: mol_type = other RNA
aagctgctgttacctttgccaagtgttccagccaccggcccagggcaatgaacacaaagagcatggggggcgtgtcgaagaatgtcacaggtgacct

SEQ ID NO: 10269 - RNA, 97 nt, synthetic construct
  source 1..97: mol_type = other RNA
aagctgctgttacctttgccaagtgttccagccaccggcccagggcaatgaacacaaagagcatggggggcgtgtcgaagaatgtcacaggcgacct

SEQ ID NO: 10270 - RNA, 98 nt, synthetic construct
  source 1..98: mol_type = other RNA
gaagctgctgttacctttgccaagtgttccagccaccggcccagggcaatgaacacaaagagcatggggggcgtgtcgaagaatgtcacaggggacct

SEQ ID NO: 10271 - RNA, 98 nt, synthetic construct
  source 1..98: mol_type = other RNA
gaagctgctgttacctttgccaagtgttccagccaccggcccagggcaatgaacacaaagagcatggggggcgtgtcgaagaatgtcacaggcgacct

SEQ ID NO: 10272 - RNA, 98 nt, synthetic construct
  source 1..98: mol_type = other RNA
gaagctgctgttacctttgccaagtgttccagccaccggcccagggcaatgaacacaaagagcatggggggcgtgtcgaagaatgtcacaggtgacct

SEQ ID NO: 10273 - RNA, 98 nt, synthetic construct
  source 1..98: mol_type = other RNA
gaagctgctgttacctttgccaagtgttccagccaccggcccagggcaatgaacacaaagagcatggggggcgtgtcgaagaatgtcacaggagacct

SEQ ID NO: 10274 - RNA, 98 nt, synthetic construct
  source 1..98: mol_type = other RNA
gaagctgctgttacctttgccaagtgttccagccaccggcccagggcaatgaacacaaagagcatggggggcgtgtcgaagaatgtcacagggctcct

SEQ ID NO: 10275 - RNA, 99 nt, synthetic construct
  source 1..99: mol_type = other RNA
tgaagctgctgttacctttgccaagtgttccagccaccggcccagggcaatgaacacaaagagcatggggggcgtgtcgaagaatgtcacagggctcct

SEQ ID NO: 10276 - RNA, 99 nt, synthetic construct
  source 1..99: mol_type = other RNA
tgaagctgctgttacctttgccaagtgttccagccaccggcccagggcaatgaacacaaagagcatggggggcgtgtcgaagaatgtcacaggcgacct

SEQ ID NO: 10277 - RNA, 99 nt, synthetic construct
  source 1..99: mol_type = other RNA
tgaagctgctgttacctttgccaagtgttccagccaccggcccagggcaatgaacacaaagagcatggggggcgtgtcgaagaatgtcacaggggacct

SEQ ID NO: 10278 - RNA, 99 nt, synthetic construct
  source 1..99: mol_type = other RNA
tgaagctgctgttacctttgccaagtgttccagccaccggcccagggcaatgaacacaaagagcatggggggcgtgtcgaagaatgtcacaggagacct

SEQ ID NO: 10279 - RNA, 99 nt, synthetic construct
  source 1..99: mol_type = other RNA
tgaagctgctgttacctttgccaagtgttccagccaccggcccagggcaatgaacacaaagagcatggggggcgtgtcgaagaatgtcacaggtgacct

SEQ ID NO: 10280 - RNA, 100 nt, synthetic construct
  source 1..100: mol_type = other RNA
ctgaagctgctgttacctttgccaagtgttccagccaccggcccagggcaatgaacacaaagagcatggggggcgtgtcgaagaatgtcacaggagacct

SEQ ID NO: 10281 - RNA, 100 nt, synthetic construct
  source 1..100: mol_type = other RNA
ctgaagctgctgttacctttgccaagtgttccagccaccggcccagggcaatgaacacaaagagcatggggggcgtgtcgaagaatgtcacagggctcct

SEQ ID NO: 10282 - RNA, 100 nt, synthetic construct
  source 1..100: mol_type = other RNA
ctgaagctgctgttacctttgccaagtgttccagccaccggcccagggcaatgaacacaaagagcatggggggcgtgtcgaagaatgtcacaggtgacct

SEQ ID NO: 10283 - RNA, 100 nt, synthetic construct
  source 1..100: mol_type = other RNA
ctgaagctgctgttacctttgccaagtgttccagccaccggcccagggcaatgaacacaaagagcatggggggcgtgtcgaagaatgtcacaggcgacct

SEQ ID NO: 10284 - RNA, 100 nt, synthetic construct
  source 1..100: mol_type = other RNA
ctgaagctgctgttacctttgccaagtgttccagccaccggcccagggcaatgaacacaaagagcatggggggcgtgtcgaagaatgtcacaggggacct

SEQ ID NO: 10285 - RNA, 20 nt, synthetic construct
  source 1..20: mol_type = other RNA
aatgtcacaggggacctctc

SEQ ID NO: 10286 - RNA, 20 nt, synthetic construct
  source 1..20: mol_type = other RNA
aatgtcacaggagacctctc

SEQ ID NO: 10287 - RNA, 20 nt, synthetic construct
  source 1..20: mol_type = other RNA
aatgtcacaggcgacctctc

SEQ ID NO: 10288 - RNA, 20 nt, synthetic construct
  source 1..20: mol_type = other RNA
aatgtcacaggtgacctctc

SEQ ID NO: 10289 - RNA, 16 nt, synthetic construct
  source 1..16: mol_type = other RNA
aggcggagaggagccc

SEQ ID NO: 10290 - RNA, 17 nt, synthetic construct
  source 1..17: mol_type = other RNA
aaggcggagaggagccc

SEQ ID NO: 10291 - RNA, 18 nt, synthetic construct
  source 1..18: mol_type = other RNA
gaaggcggagaggagccc

SEQ ID NO: 10292 - RNA, 19 nt, synthetic construct
  source 1..19: mol_type = other RNA
agaaggcggagaggagccc

SEQ ID NO: 10293 - RNA, 20 nt, synthetic construct
  source 1..20: mol_type = other RNA
gagaaggcggagaggagccc

SEQ ID NO: 10294 - RNA, 21 nt, synthetic construct
  source 1..21: mol_type = other RNA
tgagaaggcggagaggagccc

SEQ ID NO: 10295 - RNA, 22 nt, synthetic construct
  source 1..22: mol_type = other RNA
ctgagaaggcggagaggagccc

SEQ ID NO: 10296-10300 - skipped (5 entries)

SEQ ID NO: 10301 - RNA, 10 nt, synthetic construct
  source 1..10: mol_type = other RNA
ctcctctccg

SEQ ID NO: 10302 - RNA, 11 nt, synthetic construct
  source 1..11: mol_type = other RNA
ctcctctccgc

SEQ ID NO: 10303 - RNA, 12 nt, synthetic construct
  source 1..12: mol_type = other RNA
ctcctctccgcc

SEQ ID NO: 10304 - RNA, 13 nt, synthetic construct
  source 1..13: mol_type = other RNA
ctcctctccgcct

SEQ ID NO: 10305 - RNA, 14 nt, synthetic construct
  source 1..14: mol_type = other RNA
ctcctctccgcctt

SEQ ID NO: 10306 - RNA, 15 nt, synthetic construct
  source 1..15: mol_type = other RNA
ctcctctccgccttc

SEQ ID NO: 10307 - RNA, 16 nt, synthetic construct
  source 1..16: mol_type = other RNA
ctcctctccgccttct

SEQ ID NO: 10308 - RNA, 17 nt, synthetic construct
  source 1..17: mol_type = other RNA
ctcctctccgccttctc

SEQ ID NO: 10309 - RNA, 18 nt, synthetic construct
  source 1..18: mol_type = other RNA
ctcctctccgccttctca

SEQ ID NO: 10310 - RNA, 19 nt, synthetic construct
  source 1..19: mol_type = other RNA
ctcctctccgccttctcag

SEQ ID NO: 10311 - RNA, 57 nt, synthetic construct
  source 1..57: mol_type = other RNA
cggcccagggcaatgaacacaaagagcatggggggcgtgtcgaagaatgtcacaggg

SEQ ID NO: 10312 - RNA, 58 nt, synthetic construct
  source 1..58: mol_type = other RNA
ccggcccagggcaatgaacacaaagagcatggggggcgtgtcgaagaatgtcacaggg

SEQ ID NO: 10313 - RNA, 59 nt, synthetic construct
  source 1..59: mol_type = other RNA
accggcccagggcaatgaacacaaagagcatggggggcgtgtcgaagaatgtcacaggg

SEQ ID NO: 10314 - RNA, 60 nt, synthetic construct
  source 1..60: mol_type = other RNA
caccggcccagggcaatgaacacaaagagcatggggggcgtgtcgaagaatgtcacaggg

SEQ ID NO: 10315 - RNA, 61 nt, synthetic construct
  source 1..61: mol_type = other RNA
ccaccggcccagggcaatgaacacaaagagcatggggggcgtgtcgaagaatgtcacaggg

SEQ ID NO: 10316 - RNA, 62 nt, synthetic construct
  source 1..62: mol_type = other RNA
gccaccggcccagggcaatgaacacaaagagcatggggggcgtgtcgaagaatgtcacaggg

SEQ ID NO: 10317 - RNA, 63 nt, synthetic construct
  source 1..63: mol_type = other RNA
agccaccggcccagggcaatgaacacaaagagcatggggggcgtgtcgaagaatgtcacaggg

SEQ ID NO: 10318 - RNA, 64 nt, synthetic construct
  source 1..64: mol_type = other RNA
cagccaccggcccagggcaatgaacacaaagagcatggggggcgtgtcgaagaatgtcacaggg

SEQ ID NO: 10319 - RNA, 65 nt, synthetic construct
  source 1..65: mol_type = other RNA
ccagccaccggcccagggcaatgaacacaaagagcatggggggcgtgtcgaagaatgtcacaggg

SEQ ID NO: 10320 - RNA, 66 nt, synthetic construct
  source 1..66: mol_type = other RNA
tccagccaccggcccagggcaatgaacacaaagagcatggggggcgtgtcgaagaatgtcacaggg

SEQ ID NO: 10321 - RNA, 67 nt, synthetic construct
  source 1..67: mol_type = other RNA
ttccagccaccggcccagggcaatgaacacaaagagcatggggggcgtgtcgaagaatgtcacaggg

SEQ ID NO: 10322 - RNA, 68 nt, synthetic construct
  source 1..68: mol_type = other RNA
gttccagccaccggcccagggcaatgaacacaaagagcatggggggcgtgtcgaagaatgtcacaggg

SEQ ID NO: 10323 - RNA, 69 nt, synthetic construct
  source 1..69: mol_type = other RNA
tgttccagccaccggcccagggcaatgaacacaaagagcatggggggcgtgtcgaagaatgtcacaggg

SEQ ID NO: 10324 - RNA, 70 nt, synthetic construct
  source 1..70: mol_type = other RNA
gtgttccagccaccggcccagggcaatgaacacaaagagcatggggggcgtgtcgaagaatgtcacaggg

SEQ ID NO: 10325 - RNA, 71 nt, synthetic construct
  source 1..71: mol_type = other RNA
agtgttccagccaccggcccagggcaatgaacacaaagagcatggggggcgtgtcgaagaatgtcacaggg

SEQ ID NO: 10326 - RNA, 72 nt, synthetic construct
  source 1..72: mol_type = other RNA
aagtgttccagccaccggcccagggcaatgaacacaaagagcatggggggcgtgtcgaagaatgtcacaggg

SEQ ID NO: 10327 - RNA, 73 nt, synthetic construct
  source 1..73: mol_type = other RNA
caagtgttccagccaccggcccagggcaatgaacacaaagagcatggggggcgtgtcgaagaatgtcacaggg

SEQ ID NO: 10328 - RNA, 74 nt, synthetic construct
  source 1..74: mol_type = other RNA
ccaagtgttccagccaccggcccagggcaatgaacacaaagagcatggggggcgtgtcgaagaatgtcacaggg

SEQ ID NO: 10329 - RNA, 75 nt, synthetic construct
  source 1..75: mol_type = other RNA
gccaagtgttccagccaccggcccagggcaatgaacacaaagagcatggggggcgtgtcgaagaatgtcacaggg

SEQ ID NO: 10330 - RNA, 76 nt, synthetic construct
  source 1..76: mol_type = other RNA
tgccaagtgttccagccaccggcccagggcaatgaacacaaagagcatggggggcgtgtcgaagaatgtcacaggg

SEQ ID NO: 10331 - RNA, 77 nt, synthetic construct
  source 1..77: mol_type = other RNA
ttgccaagtgttccagccaccggcccagggcaatgaacacaaagagcatggggggcgtgtcgaagaatgtcacaggg

SEQ ID NO: 10332 - RNA, 78 nt, synthetic construct
  source 1..78: mol_type = other RNA
tttgccaagtgttccagccaccggcccagggcaatgaacacaaagagcatggggggcgtgtcgaagaatgtcacaggg

SEQ ID NO: 10333 - RNA, 79 nt, synthetic construct
  source 1..79: mol_type = other RNA
ctttgccaagtgttccagccaccggcccagggcaatgaacacaaagagcatggggggcgtgtcgaagaatgtcacaggg

SEQ ID NO: 10334 - RNA, 80 nt, synthetic construct
  source 1..80: mol_type = other RNA
cctttgccaagtgttccagccaccggcccagggcaatgaacacaaagagcatggggggcgtgtcgaagaatgtcacaggg

SEQ ID NO: 10335 - RNA, 81 nt, synthetic construct
  source 1..81: mol_type = other RNA
acctttgccaagtgttccagccaccggcccagggcaatgaacacaaagagcatggggggcgtgtcgaagaatgtcacaggg

SEQ ID NO: 10336 - RNA, 82 nt, synthetic construct
  source 1..82: mol_type = other RNA
tacctttgccaagtgttccagccaccggcccagggcaatgaacacaaagagcatggggggcgtgtcgaagaatgtcacaggg

SEQ ID NO: 10337 - RNA, 83 nt, synthetic construct
  source 1..83: mol_type = other RNA
ttacctttgccaagtgttccagccaccggcccagggcaatgaacacaaagagcatggggggcgtgtcgaagaatgtcacaggg

SEQ ID NO: 10338 - RNA, 84 nt, synthetic construct
  source 1..84: mol_type = other RNA
gttacctttgccaagtgttccagccaccggcccagggcaatgaacacaaagagcatggggggcgtgtcgaagaatgtcacaggg

SEQ ID NO: 10339 - RNA, 85 nt, synthetic construct
  source 1..85: mol_type = other RNA
tgttacctttgccaagtgttccagccaccggcccagggcaatgaacacaaagagcatggggggcgtgtcgaagaatgtcacaggg

SEQ ID NO: 10340 - RNA, 86 nt, synthetic construct
  source 1..86: mol_type = other RNA
ctgttacctttgccaagtgttccagccaccggcccagggcaatgaacacaaagagcatggggggcgtgtcgaagaatgtcacaggg

SEQ ID NO: 10341 - RNA, 87 nt, synthetic construct
  source 1..87: mol_type = other RNA
gctgttacctttgccaagtgttccagccaccggcccagggcaatgaacacaaagagcatggggggcgtgtcgaagaatgtcacaggg

SEQ ID NO: 10342 - RNA, 88 nt, synthetic construct
  source 1..88: mol_type = other RNA
tgctgttacctttgccaagtgttccagccaccggcccagggcaatgaacacaaagagcatggggggcgtgtcgaagaatgtcacaggg

SEQ ID NO: 10343 - RNA, 89 nt, synthetic construct
  source 1..89: mol_type = other RNA
ctgctgttacctttgccaagtgttccagccaccggcccagggcaatgaacacaaagagcatggggggcgtgtcgaagaatgtcacaggg

SEQ ID NO: 10344 - RNA, 90 nt, synthetic construct
  source 1..90: mol_type = other RNA
gctgctgttacctttgccaagtgttccagccaccggcccagggcaatgaacacaaagagcatggggggcgtgtcgaagaatgtcacaggg

SEQ ID NO: 10345 - RNA, 91 nt, synthetic construct
  source 1..91: mol_type = other RNA
agctgctgttacctttgccaagtgttccagccaccggcccagggcaatgaacacaaagagcatggggggcgtgtcgaagaatgtcacaggg

SEQ ID NO: 10346 - RNA, 92 nt, synthetic construct
  source 1..92: mol_type = other RNA
aagctgctgttacctttgccaagtgttccagccaccggcccagggcaatgaacacaaagagcatggggggcgtgtcgaagaatgtcacaggg

SEQ ID NO: 10347 - RNA, 93 nt, synthetic construct
  source 1..93: mol_type = other RNA
gaagctgctgttacctttgccaagtgttccagccaccggcccagggcaatgaacacaaagagcatggggggcgtgtcgaagaatgtcacaggg

SEQ ID NO: 10348 - RNA, 94 nt, synthetic construct
  source 1..94: mol_type = other RNA
tgaagctgctgttacctttgccaagtgttccagccaccggcccagggcaatgaacacaaagagcatggggggcgtgtcgaagaatgtcacaggg

SEQ ID NO: 10349 - RNA, 95 nt, synthetic construct
  source 1..95: mol_type = other RNA
ctgaagctgctgttacctttgccaagtgttccagccaccggcccagggcaatgaacacaaagagcatggggggcgtgtcgaagaatgtcacaggg

SEQ ID NO: 10350 - RNA, 96 nt, synthetic construct
  source 1..96: mol_type = other RNA
cctgaagctgctgttacctttgccaagtgttccagccaccggcccagggcaatgaacacaaagagcatggggggcgtgtcgaagaatgtcacaggg

SEQ ID NO: 10351 - RNA, 97 nt, synthetic construct
  source 1..97: mol_type = other RNA
acctgaagctgctgttacctttgccaagtgttccagccaccggcccagggcaatgaacacaaagagcatggggggcgtgtcgaagaatgtcacaggg

SEQ ID NO: 10352 - RNA, 98 nt, synthetic construct
  source 1..98: mol_type = other RNA
aacctgaagctgctgttacctttgccaagtgttccagccaccggcccagggcaatgaacacaaagagcatggggggcgtgtcgaagaatgtcacaggg

SEQ ID NO: 10353 - RNA, 99 nt, synthetic construct
  source 1..99: mol_type = other RNA
gaacctgaagctgctgttacctttgccaagtgttccagccaccggcccagggcaatgaacacaaagagcatggggggcgtgtcgaagaatgtcacaggg

SEQ ID NO: 10354 - RNA, 100 nt, synthetic construct
  source 1..100: mol_type = other RNA
tgaacctgaagctgctgttacctttgccaagtgttccagccaccggcccagggcaatgaacacaaagagcatggggggcgtgtcgaagaatgtcacaggg

SEQ ID NO: 10355 - RNA, 16 nt, synthetic construct
  source 1..16: mol_type = other RNA
gtgacattcttcgaca

SEQ ID NO: 10356 - RNA, 17 nt, synthetic construct
  source 1..17: mol_type = other RNA
tgtgacattcttcgaca

SEQ ID NO: 10357 - RNA, 18 nt, synthetic construct
  source 1..18: mol_type = other RNA
ctgtgacattcttcgaca

SEQ ID NO: 10358 - RNA, 19 nt, synthetic construct
  source 1..19: mol_type = other RNA
cctgtgacattcttcgaca

SEQ ID NO: 10359 - RNA, 20 nt, synthetic construct
  source 1..20: mol_type = other RNA
ccctgtgacattcttcgaca

SEQ ID NO: 10360 - RNA, 21 nt, synthetic construct
  source 1..21: mol_type = other RNA
gccctgtgacattcttcgaca

SEQ ID NO: 10361 - RNA, 22 nt, synthetic construct
  source 1..22: mol_type = other RNA
agccctgtgacattcttcgaca

SEQ ID NO: 10362-10368 - skipped (7 entries)

SEQ ID NO: 10369 - RNA, 10 nt, synthetic construct
  source 1..10: mol_type = other RNA
cgaagaatgt

SEQ ID NO: 10370 - RNA, 11 nt, synthetic construct
  source 1..11: mol_type = other RNA
cgaagaatgtc

SEQ ID NO: 10371 - RNA, 12 nt, synthetic construct
  source 1..12: mol_type = other RNA
cgaagaatgtca

SEQ ID NO: 10372 - RNA, 13 nt, synthetic construct
  source 1..13: mol_type = other RNA
cgaagaatgtcac

SEQ ID NO: 10373 - RNA, 14 nt, synthetic construct
  source 1..14: mol_type = other RNA
cgaagaatgtcaca

SEQ ID NO: 10374 - RNA, 15 nt, synthetic construct
  source 1..15: mol_type = other RNA
cgaagaatgtcacag

SEQ ID NO: 10375 - RNA, 16 nt, synthetic construct
  source 1..16: mol_type = other RNA
cgaagaatgtcacagg

SEQ ID NO: 10376 - RNA, 17 nt, synthetic construct
  source 1..17: mol_type = other RNA
cgaagaatgtcacaggg

SEQ ID NO: 10377 - RNA, 18 nt, synthetic construct
  source 1..18: mol_type = other RNA
cgaagaatgtcacagggc

SEQ ID NO: 10378 - RNA, 19 nt, synthetic construct
  source 1..19: mol_type = other RNA
cgaagaatgtcacagggct

SEQ ID NO: 10379 - RNA, 40 nt, synthetic construct
  source 1..40: mol_type = other RNA
cggcccagggcaatgaacacaaagagcatggggggggtgt

SEQ ID NO: 10380 - RNA, 40 nt, synthetic construct
  source 1..40: mol_type = other RNA
cggcccagggcaatgaacacaaagagcatggggggtgtgt

SEQ ID NO: 10381 - RNA, 40 nt, synthetic construct
  source 1..40: mol_type = other RNA
cggcccagggcaatgaacacaaagagcatggggggagtgt

SEQ ID NO: 10382 - RNA, 40 nt, synthetic construct
  source 1..40: mol_type = other RNA
cggcccagggcaatgaacacaaagagcatggggggcgtgt

SEQ ID NO: 10383 - RNA, 41 nt, synthetic construct
  source 1..41: mol_type = other RNA
ccggcccagggcaatgaacacaaagagcatggggggagtgt

SEQ ID NO: 10384 - RNA, 41 nt, synthetic construct
  source 1..41: mol_type = other RNA
ccggcccagggcaatgaacacaaagagcatggggggcgtgt

SEQ ID NO: 10385 - RNA, 41 nt, synthetic construct
  source 1..41: mol_type = other RNA
ccggcccagggcaatgaacacaaagagcatggggggggtgt

SEQ ID NO: 10386 - RNA, 41 nt, synthetic construct
  source 1..41: mol_type = other RNA
ccggcccagggcaatgaacacaaagagcatggggggtgtgt

SEQ ID NO: 10387 - RNA, 42 nt, synthetic construct
  source 1..42: mol_type = other RNA
accggcccagggcaatgaacacaaagagcatggggggtgtgt

SEQ ID NO: 10388 - RNA, 42 nt, synthetic construct
  source 1..42: mol_type = other RNA
accggcccagggcaatgaacacaaagagcatggggggcgtgt

SEQ ID NO: 10389 - RNA, 42 nt, synthetic construct
  source 1..42: mol_type = other RNA
accggcccagggcaatgaacacaaagagcatggggggagtgt

SEQ ID NO: 10390 - RNA, 42 nt, synthetic construct
  source 1..42: mol_type = other RNA
accggcccagggcaatgaacacaaagagcatggggggggtgt

SEQ ID NO: 10391 - RNA, 43 nt, synthetic construct
  source 1..43: mol_type = other RNA
caccggcccagggcaatgaacacaaagagcatggggggggtgt

SEQ ID NO: 10392 - RNA, 43 nt, synthetic construct
  source 1..43: mol_type = other RNA
caccggcccagggcaatgaacacaaagagcatggggggcgtgt

SEQ ID NO: 10393 - RNA, 43 nt, synthetic construct
  source 1..43: mol_type = other RNA
caccggcccagggcaatgaacacaaagagcatggggggagtgt

SEQ ID NO: 10394 - RNA, 43 nt, synthetic construct
  source 1..43: mol_type = other RNA
caccggcccagggcaatgaacacaaagagcatggggggtgtgt

SEQ ID NO: 10395 - RNA, 44 nt, synthetic construct
  source 1..44: mol_type = other RNA
ccaccggcccagggcaatgaacacaaagagcatggggggagtgt

SEQ ID NO: 10396 - RNA, 44 nt, synthetic construct
  source 1..44: mol_type = other RNA
ccaccggcccagggcaatgaacacaaagagcatggggggcgtgt

SEQ ID NO: 10397 - RNA, 44 nt, synthetic construct
  source 1..44: mol_type = other RNA
ccaccggcccagggcaatgaacacaaagagcatggggggggtgt

SEQ ID NO: 10398 - RNA, 44 nt, synthetic construct
  source 1..44: mol_type = other RNA
ccaccggcccagggcaatgaacacaaagagcatggggggtgtgt

SEQ ID NO: 10399 - RNA, 45 nt, synthetic construct
  source 1..45: mol_type = other RNA
gccaccggcccagggcaatgaacacaaagagcatggggggcgtgt

SEQ ID NO: 10400 - RNA, 45 nt, synthetic construct
  source 1..45: mol_type = other RNA
gccaccggcccagggcaatgaacacaaagagcatggggggagtgt

SEQ ID NO: 10401 - RNA, 45 nt, synthetic construct
  source 1..45: mol_type = other RNA
gccaccggcccagggcaatgaacacaaagagcatggggggtgtgt

SEQ ID NO: 10402 - RNA, 45 nt, synthetic construct
  source 1..45: mol_type = other RNA
gccaccggcccagggcaatgaacacaaagagcatggggggggtgt

SEQ ID NO: 10403 - RNA, 46 nt, synthetic construct
  source 1..46: mol_type = other RNA
agccaccggcccagggcaatgaacacaaagagcatggggggcgtgt

SEQ ID NO: 10404 - RNA, 46 nt, synthetic construct
  source 1..46: mol_type = other RNA
agccaccggcccagggcaatgaacacaaagagcatggggggtgtgt

SEQ ID NO: 10405 - RNA, 46 nt, synthetic construct
  source 1..46: mol_type = other RNA
agccaccggcccagggcaatgaacacaaagagcatggggggggtgt

SEQ ID NO: 10406 - RNA, 46 nt, synthetic construct
  source 1..46: mol_type = other RNA
agccaccggcccagggcaatgaacacaaagagcatggggggagtgt

SEQ ID NO: 10407 - RNA, 47 nt, synthetic construct
  source 1..47: mol_type = other RNA
cagccaccggcccagggcaatgaacacaaagagcatggggggtgtgt

SEQ ID NO: 10408 - RNA, 47 nt, synthetic construct
  source 1..47: mol_type = other RNA
cagccaccggcccagggcaatgaacacaaagagcatggggggcgtgt

SEQ ID NO: 10409 - RNA, 47 nt, synthetic construct
  source 1..47: mol_type = other RNA
cagccaccggcccagggcaatgaacacaaagagcatggggggggtgt

SEQ ID NO: 10410 - RNA, 47 nt, synthetic construct
  source 1..47: mol_type = other RNA
cagccaccggcccagggcaatgaacacaaagagcatggggggagtgt

SEQ ID NO: 10411 - RNA, 48 nt, synthetic construct
  source 1..48: mol_type = other RNA
ccagccaccggcccagggcaatgaacacaaagagcatggggggagtgt

SEQ ID NO: 10412 - RNA, 48 nt, synthetic construct
  source 1..48: mol_type = other RNA
ccagccaccggcccagggcaatgaacacaaagagcatggggggcgtgt

SEQ ID NO: 10413 - RNA, 48 nt, synthetic construct
  source 1..48: mol_type = other RNA
ccagccaccggcccagggcaatgaacacaaagagcatggggggtgtgt

SEQ ID NO: 10414 - RNA, 48 nt, synthetic construct
  source 1..48: mol_type = other RNA
ccagccaccggcccagggcaatgaacacaaagagcatggggggggtgt

SEQ ID NO: 10415 - RNA, 49 nt, synthetic construct
  source 1..49: mol_type = other RNA
tccagccaccggcccagggcaatgaacacaaagagcatggggggtgtgt

SEQ ID NO: 10416 - RNA, 49 nt, synthetic construct
  source 1..49: mol_type = other RNA
tccagccaccggcccagggcaatgaacacaaagagcatggggggagtgt

SEQ ID NO: 10417 - RNA, 49 nt, synthetic construct
  source 1..49: mol_type = other RNA
tccagccaccggcccagggcaatgaacacaaagagcatggggggggtgt

SEQ ID NO: 10418 - RNA, 49 nt, synthetic construct
  source 1..49: mol_type = other RNA
tccagccaccggcccagggcaatgaacacaaagagcatggggggcgtgt

SEQ ID NO: 10419 - RNA, 50 nt, synthetic construct
  source 1..50: mol_type = other RNA
ttccagccaccggcccagggcaatgaacacaaagagcatggggggggtgt

SEQ ID NO: 10420 - RNA, 50 nt, synthetic construct
  source 1..50: mol_type = other RNA
ttccagccaccggcccagggcaatgaacacaaagagcatggggggcgtgt

SEQ ID NO: 10421 - RNA, 50 nt, synthetic construct
  source 1..50: mol_type = other RNA
ttccagccaccggcccagggcaatgaacacaaagagcatggggggagtgt

SEQ ID NO: 10422 - RNA, 50 nt, synthetic construct
  source 1..50: mol_type = other RNA
ttccagccaccggcccagggcaatgaacacaaagagcatggggggtgtgt

SEQ ID NO: 10423 - RNA, 51 nt, synthetic construct
  source 1..51: mol_type = other RNA
gttccagccaccggcccagggcaatgaacacaaagagcatggggggggtgt

SEQ ID NO: 10424 - RNA, 51 nt, synthetic construct
  source 1..51: mol_type = other RNA
gttccagccaccggcccagggcaatgaacacaaagagcatggggggcgtgt

SEQ ID NO: 10425 - RNA, 51 nt, synthetic construct
  source 1..51: mol_type = other RNA
gttccagccaccggcccagggcaatgaacacaaagagcatggggggtgtgt

SEQ ID NO: 10426 - RNA, 51 nt, synthetic construct
  source 1..51: mol_type = other RNA
gttccagccaccggcccagggcaatgaacacaaagagcatggggggagtgt

SEQ ID NO: 10427 - RNA, 52 nt, synthetic construct
  source 1..52: mol_type = other RNA
tgttccagccaccggcccagggcaatgaacacaaagagcatggggggagtgt

SEQ ID NO: 10428 - RNA, 52 nt, synthetic construct
  source 1..52: mol_type = other RNA
tgttccagccaccggcccagggcaatgaacacaaagagcatggggggcgtgt

SEQ ID NO: 10429 - RNA, 52 nt, synthetic construct
  source 1..52: mol_type = other RNA
tgttccagccaccggcccagggcaatgaacacaaagagcatggggggggtgt

SEQ ID NO: 10430 - RNA, 52 nt, synthetic construct
  source 1..52: mol_type = other RNA
tgttccagccaccggcccagggcaatgaacacaaagagcatggggggtgtgt

SEQ ID NO: 10431 - RNA, 53 nt, synthetic construct
  source 1..53: mol_type = other RNA
gtgttccagccaccggcccagggcaatgaacacaaagagcatggggggcgtgt

SEQ ID NO: 10432 - RNA, 53 nt, synthetic construct
  source 1..53: mol_type = other RNA
gtgttccagccaccggcccagggcaatgaacacaaagagcatggggggggtgt

SEQ ID NO: 10433 - RNA, 53 nt, synthetic construct
  source 1..53: mol_type = other RNA
gtgttccagccaccggcccagggcaatgaacacaaagagcatggggggagtgt

SEQ ID NO: 10434 - RNA, 53 nt, synthetic construct
  source 1..53: mol_type = other RNA
gtgttccagccaccggcccagggcaatgaacacaaagagcatggggggtgtgt

SEQ ID NO: 10435 - RNA, 54 nt, synthetic construct
  source 1..54: mol_type = other RNA
agtgttccagccaccggcccagggcaatgaacacaaagagcatggggggggtgt

SEQ ID NO: 10436 - RNA, 54 nt, synthetic construct
  source 1..54: mol_type = other RNA
agtgttccagccaccggcccagggcaatgaacacaaagagcatggggggtgtgt

SEQ ID NO: 10437 - RNA, 54 nt, synthetic construct
  source 1..54: mol_type = other RNA
agtgttccagccaccggcccagggcaatgaacacaaagagcatggggggagtgt

SEQ ID NO: 10438 - RNA, 54 nt, synthetic construct
  source 1..54: mol_type = other RNA
agtgttccagccaccggcccagggcaatgaacacaaagagcatggggggcgtgt

SEQ ID NO: 10439 - RNA, 55 nt, synthetic construct
  source 1..55: mol_type = other RNA
aagtgttccagccaccggcccagggcaatgaacacaaagagcatggggggtgtgt

SEQ ID NO: 10440 - RNA, 55 nt, synthetic construct
  source 1..55: mol_type = other RNA
aagtgttccagccaccggcccagggcaatgaacacaaagagcatggggggagtgt

SEQ ID NO: 10441 - RNA, 55 nt, synthetic construct
  source 1..55: mol_type = other RNA
aagtgttccagccaccggcccagggcaatgaacacaaagagcatggggggcgtgt

SEQ ID NO: 10442 - RNA, 55 nt, synthetic construct
  source 1..55: mol_type = other RNA
aagtgttccagccaccggcccagggcaatgaacacaaagagcatggggggggtgt

SEQ ID NO: 10443 - RNA, 56 nt, synthetic construct
  source 1..56: mol_type = other RNA
caagtgttccagccaccggcccagggcaatgaacacaaagagcatggggggagtgt

SEQ ID NO: 10444 - RNA, 56 nt, synthetic construct
  source 1..56: mol_type = other RNA
caagtgttccagccaccggcccagggcaatgaacacaaagagcatggggggtgtgt

SEQ ID NO: 10445 - RNA, 56 nt, synthetic construct
  source 1..56: mol_type = other RNA
caagtgttccagccaccggcccagggcaatgaacacaaagagcatggggggcgtgt

SEQ ID NO: 10446 - RNA, 56 nt, synthetic construct
  source 1..56: mol_type = other RNA
caagtgttccagccaccggcccagggcaatgaacacaaagagcatggggggggtgt

SEQ ID NO: 10447 - RNA, 57 nt, synthetic construct
  source 1..57: mol_type = other RNA
ccaagtgttccagccaccggcccagggcaatgaacacaaagagcatggggggtgtgt

SEQ ID NO: 10448 - RNA, 57 nt, synthetic construct
  source 1..57: mol_type = other RNA
ccaagtgttccagccaccggcccagggcaatgaacacaaagagcatggggggcgtgt

SEQ ID NO: 10449 - RNA, 57 nt, synthetic construct
  source 1..57: mol_type = other RNA
ccaagtgttccagccaccggcccagggcaatgaacacaaagagcatggggggagtgt

SEQ ID NO: 10450 - RNA, 57 nt, synthetic construct
  source 1..57: mol_type = other RNA
ccaagtgttccagccaccggcccagggcaatgaacacaaagagcatggggggggtgt

SEQ ID NO: 10451 - RNA, 58 nt, synthetic construct
  source 1..58: mol_type = other RNA
gccaagtgttccagccaccggcccagggcaatgaacacaaagagcatggggggggtgt

SEQ ID NO: 10452 - RNA, 58 nt, synthetic construct
  source 1..58: mol_type = other RNA
gccaagtgttccagccaccggcccagggcaatgaacacaaagagcatggggggcgtgt

SEQ ID NO: 10453 - RNA, 58 nt, synthetic construct
  source 1..58: mol_type = other RNA
gccaagtgttccagccaccggcccagggcaatgaacacaaagagcatggggggagtgt

SEQ ID NO: 10454 - RNA, 58 nt, synthetic construct
  source 1..58: mol_type = other RNA
gccaagtgttccagccaccggcccagggcaatgaacacaaagagcatggggggtgtgt

SEQ ID NO: 10455 - RNA, 59 nt, synthetic construct
  source 1..59: mol_type = other RNA
tgccaagtgttccagccaccggcccagggcaatgaacacaaagagcatggggggcgtgt

SEQ ID NO: 10456 - RNA, 59 nt, synthetic construct
  source 1..59: mol_type = other RNA
tgccaagtgttccagccaccggcccagggcaatgaacacaaagagcatggggggggtgt

SEQ ID NO: 10457 - RNA, 59 nt, synthetic construct
  source 1..59: mol_type = other RNA
tgccaagtgttccagccaccggcccagggcaatgaacacaaagagcatggggggagtgt

SEQ ID NO: 10458 - RNA, 59 nt, synthetic construct
  source 1..59: mol_type = other RNA
tgccaagtgttccagccaccggcccagggcaatgaacacaaagagcatggggggtgtgt

SEQ ID NO: 10459 - RNA, 60 nt, synthetic construct
  source 1..60: mol_type = other RNA
ttgccaagtgttccagccaccggcccagggcaatgaacacaaagagcatggggggcgtgt

SEQ ID NO: 10460 - RNA, 60 nt, synthetic construct
  source 1..60: mol_type = other RNA
ttgccaagtgttccagccaccggcccagggcaatgaacacaaagagcatggggggtgtgt

SEQ ID NO: 10461 - RNA, 60 nt, synthetic construct
  source 1..60: mol_type = other RNA
ttgccaagtgttccagccaccggcccagggcaatgaacacaaagagcatggggggagtgt

SEQ ID NO: 10462 - RNA, 60 nt, synthetic construct
  source 1..60: mol_type = other RNA
ttgccaagtgttccagccaccggcccagggcaatgaacacaaagagcatggggggggtgt

SEQ ID NO: 10463 - RNA, 61 nt, synthetic construct
  source 1..61: mol_type = other RNA
tttgccaagtgttccagccaccggcccagggcaatgaacacaaagagcatggggggtgtgt

SEQ ID NO: 10464 - RNA, 61 nt, synthetic construct
  source 1..61: mol_type = other RNA
tttgccaagtgttccagccaccggcccagggcaatgaacacaaagagcatggggggggtgt

SEQ ID NO: 10465 - RNA, 61 nt, synthetic construct
  source 1..61: mol_type = other RNA
tttgccaagtgttccagccaccggcccagggcaatgaacacaaagagcatggggggagtgt

SEQ ID NO: 10466 - RNA, 61 nt, synthetic construct
  source 1..61: mol_type = other RNA
tttgccaagtgttccagccaccggcccagggcaatgaacacaaagagcatggggggcgtgt

SEQ ID NO: 10467 - RNA, 62 nt, synthetic construct
  source 1..62: mol_type = other RNA
ctttgccaagtgttccagccaccggcccagggcaatgaacacaaagagcatggggggtgtgt

SEQ ID NO: 10468 - RNA, 62 nt, synthetic construct
  source 1..62: mol_type = other RNA
ctttgccaagtgttccagccaccggcccagggcaatgaacacaaagagcatggggggcgtgt

SEQ ID NO: 10469 - RNA, 62 nt, synthetic construct
  source 1..62: mol_type = other RNA
ctttgccaagtgttccagccaccggcccagggcaatgaacacaaagagcatggggggagtgt

SEQ ID NO: 10470 - RNA, 62 nt, synthetic construct
  source 1..62: mol_type = other RNA
ctttgccaagtgttccagccaccggcccagggcaatgaacacaaagagcatggggggggtgt

SEQ ID NO: 10471 - RNA, 63 nt, synthetic construct
  source 1..63: mol_type = other RNA
cctttgccaagtgttccagccaccggcccagggcaatgaacacaaagagcatggggggggtgt

SEQ ID NO: 10472 - RNA, 63 nt, synthetic construct
  source 1..63: mol_type = other RNA
cctttgccaagtgttccagccaccggcccagggcaatgaacacaaagagcatggggggtgtgt

SEQ ID NO: 10473 - RNA, 63 nt, synthetic construct
  source 1..63: mol_type = other RNA
cctttgccaagtgttccagccaccggcccagggcaatgaacacaaagagcatggggggcgtgt

SEQ ID NO: 10474 - RNA, 63 nt, synthetic construct
  source 1..63: mol_type = other RNA
cctttgccaagtgttccagccaccggcccagggcaatgaacacaaagagcatggggggagtgt

SEQ ID NO: 10475 - RNA, 64 nt, synthetic construct
  source 1..64: mol_type = other RNA
acctttgccaagtgttccagccaccggcccagggcaatgaacacaaagagcatggggggggtgt

SEQ ID NO: 10476 - RNA, 64 nt, synthetic construct
  source 1..64: mol_type = other RNA
acctttgccaagtgttccagccaccggcccagggcaatgaacacaaagagcatggggggcgtgt

SEQ ID NO: 10477 - RNA, 64 nt, synthetic construct
  source 1..64: mol_type = other RNA
acctttgccaagtgttccagccaccggcccagggcaatgaacacaaagagcatggggggagtgt

SEQ ID NO: 10478 - RNA, 64 nt, synthetic construct
  source 1..64: mol_type = other RNA
acctttgccaagtgttccagccaccggcccagggcaatgaacacaaagagcatggggggtgtgt

SEQ ID NO: 10479 - RNA, 65 nt, synthetic construct
  source 1..65: mol_type = other RNA
tacctttgccaagtgttccagccaccggcccagggcaatgaacacaaagagcatggggggtgtgt

SEQ ID NO: 10480 - RNA, 65 nt, synthetic construct
  source 1..65: mol_type = other RNA
tacctttgccaagtgttccagccaccggcccagggcaatgaacacaaagagcatggggggcgtgt

SEQ ID NO: 10481 - RNA, 65 nt, synthetic construct
  source 1..65: mol_type = other RNA
tacctttgccaagtgttccagccaccggcccagggcaatgaacacaaagagcatggggggggtgt

SEQ ID NO: 10482 - RNA, 65 nt, synthetic construct
  source 1..65: mol_type = other RNA
tacctttgccaagtgttccagccaccggcccagggcaatgaacacaaagagcatggggggagtgt

SEQ ID NO: 10483 - RNA, 66 nt, synthetic construct
  source 1..66: mol_type = other RNA
ttacctttgccaagtgttccagccaccggcccagggcaatgaacacaaagagcatggggggggtgt

SEQ ID NO: 10484 - RNA, 66 nt, synthetic construct
  source 1..66: mol_type = other RNA
ttacctttgccaagtgttccagccaccggcccagggcaatgaacacaaagagcatggggggtgtgt

SEQ ID NO: 10485 - RNA, 66 nt, synthetic construct
  source 1..66: mol_type = other RNA
ttacctttgccaagtgttccagccaccggcccagggcaatgaacacaaagagcatggggggagtgt

SEQ ID NO: 10486 - RNA, 66 nt, synthetic construct
  source 1..66: mol_type = other RNA
ttacctttgccaagtgttccagccaccggcccagggcaatgaacacaaagagcatggggggcgtgt

SEQ ID NO: 10487 - RNA, 67 nt, synthetic construct
  source 1..67: mol_type = other RNA
gttacctttgccaagtgttccagccaccggcccagggcaatgaacacaaagagcatggggggagtgt

SEQ ID NO: 10488 - RNA, 67 nt, synthetic construct
  source 1..67: mol_type = other RNA
gttacctttgccaagtgttccagccaccggcccagggcaatgaacacaaagagcatggggggcgtgt

SEQ ID NO: 10489 - RNA, 67 nt, synthetic construct
  source 1..67: mol_type = other RNA
gttacctttgccaagtgttccagccaccggcccagggcaatgaacacaaagagcatggggggggtgt

SEQ ID NO: 10490 - RNA, 67 nt, synthetic construct
  source 1..67: mol_type = other RNA
gttacctttgccaagtgttccagccaccggcccagggcaatgaacacaaagagcatggggggtgtgt

SEQ ID NO: 10491 - RNA, 68 nt, synthetic construct
  source 1..68: mol_type = other RNA
tgttacctttgccaagtgttccagccaccggcccagggcaatgaacacaaagagcatggggggagtgt

SEQ ID NO: 10492 - RNA, 68 nt, synthetic construct
  source 1..68: mol_type = other RNA
tgttacctttgccaagtgttccagccaccggcccagggcaatgaacacaaagagcatggggggtgtgt

SEQ ID NO: 10493 - RNA, 68 nt, synthetic construct
  source 1..68: mol_type = other RNA
tgttacctttgccaagtgttccagccaccggcccagggcaatgaacacaaagagcatggggggcgtgt

SEQ ID NO: 10494 - RNA, 68 nt, synthetic construct
  source 1..68: mol_type = other RNA
tgttacctttgccaagtgttccagccaccggcccagggcaatgaacacaaagagcatggggggggtgt

SEQ ID NO: 10495 - RNA, 69 nt, synthetic construct
  source 1..69: mol_type = other RNA
ctgttacctttgccaagtgttccagccaccggcccagggcaatgaacacaaagagcatggggggggtgt

SEQ ID NO: 10496 - RNA, 69 nt, synthetic construct
  source 1..69: mol_type = other RNA
ctgttacctttgccaagtgttccagccaccggcccagggcaatgaacacaaagagcatggggggagtgt

SEQ ID NO: 10497 - RNA, 69 nt, synthetic construct
  source 1..69: mol_type = other RNA
ctgttacctttgccaagtgttccagccaccggcccagggcaatgaacacaaagagcatggggggcgtgt

SEQ ID NO: 10498 - RNA, 69 nt, synthetic construct
  source 1..69: mol_type = other RNA
ctgttacctttgccaagtgttccagccaccggcccagggcaatgaacacaaagagcatggggggtgtgt

SEQ ID NO: 10499 - RNA, 70 nt, synthetic construct
  source 1..70: mol_type = other RNA
gctgttacctttgccaagtgttccagccaccggcccagggcaatgaacacaaagagcatggggggggtgt

SEQ ID NO: 10500 - RNA, 70 nt, synthetic construct
  source 1..70: mol_type = other RNA
gctgttacctttgccaagtgttccagccaccggcccagggcaatgaacacaaagagcatggggggcgtgt

SEQ ID NO: 10501 - RNA, 70 nt, synthetic construct
  source 1..70: mol_type = other RNA
gctgttacctttgccaagtgttccagccaccggcccagggcaatgaacacaaagagcatggggggagtgt

SEQ ID NO: 10502 - RNA, 70 nt, synthetic construct
  source 1..70: mol_type = other RNA
gctgttacctttgccaagtgttccagccaccggcccagggcaatgaacacaaagagcatggggggtgtgt

SEQ ID NO: 10503 - RNA, 71 nt, synthetic construct
  source 1..71: mol_type = other RNA
tgctgttacctttgccaagtgttccagccaccggcccagggcaatgaacacaaagagcatggggggagtgt

SEQ ID NO: 10504 - RNA, 71 nt, synthetic construct
  source 1..71: mol_type = other RNA
tgctgttacctttgccaagtgttccagccaccggcccagggcaatgaacacaaagagcatggggggcgtgt

SEQ ID NO: 10505 - RNA, 71 nt, synthetic construct
  source 1..71: mol_type = other RNA
tgctgttacctttgccaagtgttccagccaccggcccagggcaatgaacacaaagagcatggggggggtgt

SEQ ID NO: 10506 - RNA, 71 nt, synthetic construct
  source 1..71: mol_type = other RNA
tgctgttacctttgccaagtgttccagccaccggcccagggcaatgaacacaaagagcatggggggtgtgt

SEQ ID NO: 10507 - RNA, 72 nt, synthetic construct
  source 1..72: mol_type = other RNA
ctgctgttacctttgccaagtgttccagccaccggcccagggcaatgaacacaaagagcatggggggagtgt

SEQ ID NO: 10508 - RNA, 72 nt, synthetic construct
  source 1..72: mol_type = other RNA
ctgctgttacctttgccaagtgttccagccaccggcccagggcaatgaacacaaagagcatggggggcgtgt

SEQ ID NO: 10509 - RNA, 72 nt, synthetic construct
  source 1..72: mol_type = other RNA
ctgctgttacctttgccaagtgttccagccaccggcccagggcaatgaacacaaagagcatggggggtgtgt

SEQ ID NO: 10510 - RNA, 72 nt, synthetic construct
  source 1..72: mol_type = other RNA
ctgctgttacctttgccaagtgttccagccaccggcccagggcaatgaacacaaagagcatggggggggtgt

SEQ ID NO: 10511 - RNA, 73 nt, synthetic construct
  source 1..73: mol_type = other RNA
gctgctgttacctttgccaagtgttccagccaccggcccagggcaatgaacacaaagagcatggggggagtgt

SEQ ID NO: 10512 - RNA, 73 nt, synthetic construct
  source 1..73: mol_type = other RNA
gctgctgttacctttgccaagtgttccagccaccggcccagggcaatgaacacaaagagcatggggggcgtgt

SEQ ID NO: 10513 - RNA, 73 nt, synthetic construct
  source 1..73: mol_type = other RNA
gctgctgttacctttgccaagtgttccagccaccggcccagggcaatgaacacaaagagcatggggggggtgt

SEQ ID NO: 10514 - RNA, 73 nt, synthetic construct
  source 1..73: mol_type = other RNA
gctgctgttacctttgccaagtgttccagccaccggcccagggcaatgaacacaaagagcatggggggtgtgt

SEQ ID NO: 10515 - RNA, 74 nt, synthetic construct
  source 1..74: mol_type = other RNA
agctgctgttacctttgccaagtgttccagccaccggcccagggcaatgaacacaaagagcatggggggggtgt

SEQ ID NO: 10516 - RNA, 74 nt, synthetic construct
  source 1..74: mol_type = other RNA
agctgctgttacctttgccaagtgttccagccaccggcccagggcaatgaacacaaagagcatggggggtgtgt

SEQ ID NO: 10517 - RNA, 74 nt, synthetic construct
  source 1..74: mol_type = other RNA
agctgctgttacctttgccaagtgttccagccaccggcccagggcaatgaacacaaagagcatggggggcgtgt

SEQ ID NO: 10518 - RNA, 74 nt, synthetic construct
  source 1..74: mol_type = other RNA
agctgctgttacctttgccaagtgttccagccaccggcccagggcaatgaacacaaagagcatggggggagtgt

SEQ ID NO: 10519 - RNA, 75 nt, synthetic construct
  source 1..75: mol_type = other RNA
aagctgctgttacctttgccaagtgttccagccaccggcccagggcaatgaacacaaagagcatggggggtgtgt

SEQ ID NO: 10520 - RNA, 75 nt, synthetic construct
  source 1..75: mol_type = other RNA
aagctgctgttacctttgccaagtgttccagccaccggcccagggcaatgaacacaaagagcatggggggagtgt

SEQ ID NO: 10521 - RNA, 75 nt, synthetic construct
  source 1..75: mol_type = other RNA
aagctgctgttacctttgccaagtgttccagccaccggcccagggcaatgaacacaaagagcatggggggcgtgt

SEQ ID NO: 10522 - RNA, 75 nt, synthetic construct
  source 1..75: mol_type = other RNA
aagctgctgttacctttgccaagtgttccagccaccggcccagggcaatgaacacaaagagcatggggggggtgt

SEQ ID NO: 10523 - RNA, 76 nt, synthetic construct
  source 1..76: mol_type = other RNA
gaagctgctgttacctttgccaagtgttccagccaccggcccagggcaatgaacacaaagagcatggggggggtgt

SEQ ID NO: 10524 - RNA, 76 nt, synthetic construct
  source 1..76: mol_type = other RNA
gaagctgctgttacctttgccaagtgttccagccaccggcccagggcaatgaacacaaagagcatggggggtgtgt

SEQ ID NO: 10525 - RNA, 76 nt, synthetic construct
  source 1..76: mol_type = other RNA
gaagctgctgttacctttgccaagtgttccagccaccggcccagggcaatgaacacaaagagcatggggggcgtgt

SEQ ID NO: 10526 - RNA, 76 nt, synthetic construct
  source 1..76: mol_type = other RNA
gaagctgctgttacctttgccaagtgttccagccaccggcccagggcaatgaacacaaagagcatggggggagtgt

SEQ ID NO: 10527 - RNA, 77 nt, synthetic construct
  source 1..77: mol_type = other RNA
tgaagctgctgttacctttgccaagtgttccagccaccggcccagggcaatgaacacaaagagcatggggggtgtgt

SEQ ID NO: 10528 - RNA, 77 nt, synthetic construct
  source 1..77: mol_type = other RNA
tgaagctgctgttacctttgccaagtgttccagccaccggcccagggcaatgaacacaaagagcatggggggagtgt

SEQ ID NO: 10529 - RNA, 77 nt, synthetic construct
  source 1..77: mol_type = other RNA
tgaagctgctgttacctttgccaagtgttccagccaccggcccagggcaatgaacacaaagagcatggggggcgtgt

SEQ ID NO: 10530 - RNA, 77 nt, synthetic construct
  source 1..77: mol_type = other RNA
tgaagctgctgttacctttgccaagtgttccagccaccggcccagggcaatgaacacaaagagcatggggggggtgt

SEQ ID NO: 10531 - RNA, 78 nt, synthetic construct
  source 1..78: mol_type = other RNA
ctgaagctgctgttacctttgccaagtgttccagccaccggcccagggcaatgaacacaaagagcatggggggggtgt

SEQ ID NO: 10532 - RNA, 78 nt, synthetic construct
  source 1..78: mol_type = other RNA
ctgaagctgctgttacctttgccaagtgttccagccaccggcccagggcaatgaacacaaagagcatggggggtgtgt

SEQ ID NO: 10533 - RNA, 78 nt, synthetic construct
  source 1..78: mol_type = other RNA
ctgaagctgctgttacctttgccaagtgttccagccaccggcccagggcaatgaacacaaagagcatggggggcgtgt

SEQ ID NO: 10534 - RNA, 78 nt, synthetic construct
  source 1..78: mol_type = other RNA
ctgaagctgctgttacctttgccaagtgttccagccaccggcccagggcaatgaacacaaagagcatggggggagtgt

SEQ ID NO: 10535 - RNA, 79 nt, synthetic construct
  source 1..79: mol_type = other RNA
cctgaagctgctgttacctttgccaagtgttccagccaccggcccagggcaatgaacacaaagagcatggggggtgtgt

SEQ ID NO: 10536 - RNA, 79 nt, synthetic construct
  source 1..79: mol_type = other RNA
cctgaagctgctgttacctttgccaagtgttccagccaccggcccagggcaatgaacacaaagagcatggggggggtgt

SEQ ID NO: 10537 - RNA, 79 nt, synthetic construct
  source 1..79: mol_type = other RNA
cctgaagctgctgttacctttgccaagtgttccagccaccggcccagggcaatgaacacaaagagcatggggggcgtgt

SEQ ID NO: 10538 - RNA, 79 nt, synthetic construct
  source 1..79: mol_type = other RNA
cctgaagctgctgttacctttgccaagtgttccagccaccggcccagggcaatgaacacaaagagcatggggggagtgt

SEQ ID NO: 10539 - RNA, 80 nt, synthetic construct
  source 1..80: mol_type = other RNA
acctgaagctgctgttacctttgccaagtgttccagccaccggcccagggcaatgaacacaaagagcatggggggggtgt

SEQ ID NO: 10540 - RNA, 80 nt, synthetic construct
  source 1..80: mol_type = other RNA
acctgaagctgctgttacctttgccaagtgttccagccaccggcccagggcaatgaacacaaagagcatggggggagtgt

SEQ ID NO: 10541 - RNA, 80 nt, synthetic construct
  source 1..80: mol_type = other RNA
acctgaagctgctgttacctttgccaagtgttccagccaccggcccagggcaatgaacacaaagagcatggggggcgtgt

SEQ ID NO: 10542 - RNA, 80 nt, synthetic construct
  source 1..80: mol_type = other RNA
acctgaagctgctgttacctttgccaagtgttccagccaccggcccagggcaatgaacacaaagagcatggggggtgtgt

SEQ ID NO: 10543 - RNA, 81 nt, synthetic construct
  source 1..81: mol_type = other RNA
aacctgaagctgctgttacctttgccaagtgttccagccaccggcccagggcaatgaacacaaagagcatggggggagtgt

SEQ ID NO: 10544 - RNA, 81 nt, synthetic construct
  source 1..81: mol_type = other RNA
aacctgaagctgctgttacctttgccaagtgttccagccaccggcccagggcaatgaacacaaagagcatggggggggtgt

SEQ ID NO: 10545 - RNA, 81 nt, synthetic construct
  source 1..81: mol_type = other RNA
aacctgaagctgctgttacctttgccaagtgttccagccaccggcccagggcaatgaacacaaagagcatggggggtgtgt

SEQ ID NO: 10546 - RNA, 81 nt, synthetic construct
  source 1..81: mol_type = other RNA
aacctgaagctgctgttacctttgccaagtgttccagccaccggcccagggcaatgaacacaaagagcatggggggcgtgt

SEQ ID NO: 10547 - RNA, 82 nt, synthetic construct
  source 1..82: mol_type = other RNA
gaacctgaagctgctgttacctttgccaagtgttccagccaccggcccagggcaatgaacacaaagagcatggggggagtgt

SEQ ID NO: 10548 - RNA, 82 nt, synthetic construct
  source 1..82: mol_type = other RNA
gaacctgaagctgctgttacctttgccaagtgttccagccaccggcccagggcaatgaacacaaagagcatggggggcgtgt

SEQ ID NO: 10549 - RNA, 82 nt, synthetic construct
  source 1..82: mol_type = other RNA
gaacctgaagctgctgttacctttgccaagtgttccagccaccggcccagggcaatgaacacaaagagcatggggggggtgt

SEQ ID NO: 10550 - RNA, 82 nt, synthetic construct
  source 1..82: mol_type = other RNA
gaacctgaagctgctgttacctttgccaagtgttccagccaccggcccagggcaatgaacacaaagagcatggggggtgtgt

SEQ ID NO: 10551 - RNA, 83 nt, synthetic construct
  source 1..83: mol_type = other RNA
tgaacctgaagctgctgttacctttgccaagtgttccagccaccggcccagggcaatgaacacaaagagcatggggggagtgt

SEQ ID NO: 10552 - RNA, 83 nt, synthetic construct
  source 1..83: mol_type = other RNA
tgaacctgaagctgctgttacctttgccaagtgttccagccaccggcccagggcaatgaacacaaagagcatggggggtgtgt

SEQ ID NO: 10553 - RNA, 83 nt, synthetic construct
  source 1..83: mol_type = other RNA
tgaacctgaagctgctgttacctttgccaagtgttccagccaccggcccagggcaatgaacacaaagagcatggggggcgtgt

SEQ ID NO: 10554 - RNA, 83 nt, synthetic construct
  source 1..83: mol_type = other RNA
tgaacctgaagctgctgttacctttgccaagtgttccagccaccggcccagggcaatgaacacaaagagcatggggggggtgt

SEQ ID NO: 10555 - RNA, 84 nt, synthetic construct
  source 1..84: mol_type = other RNA
ctgaacctgaagctgctgttacctttgccaagtgttccagccaccggcccagggcaatgaacacaaagagcatggggggggtgt

SEQ ID NO: 10556 - RNA, 84 nt, synthetic construct
  source 1..84: mol_type = other RNA
ctgaacctgaagctgctgttacctttgccaagtgttccagccaccggcccagggcaatgaacacaaagagcatggggggtgtgt

SEQ ID NO: 10557 - RNA, 84 nt, synthetic construct
  source 1..84: mol_type = other RNA
ctgaacctgaagctgctgttacctttgccaagtgttccagccaccggcccagggcaatgaacacaaagagcatggggggagtgt

SEQ ID NO: 10558 - RNA, 84 nt, synthetic construct
  source 1..84: mol_type = other RNA
ctgaacctgaagctgctgttacctttgccaagtgttccagccaccggcccagggcaatgaacacaaagagcatggggggcgtgt

SEQ ID NO: 10559 - RNA, 85 nt, synthetic construct
  source 1..85: mol_type = other RNA
tctgaacctgaagctgctgttacctttgccaagtgttccagccaccggcccagggcaatgaacacaaagagcatggggggggtgt

SEQ ID NO: 10560 - RNA, 85 nt, synthetic construct
  source 1..85: mol_type = other RNA
tctgaacctgaagctgctgttacctttgccaagtgttccagccaccggcccagggcaatgaacacaaagagcatggggggtgtgt

SEQ ID NO: 10561 - RNA, 85 nt, synthetic construct
  source 1..85: mol_type = other RNA
tctgaacctgaagctgctgttacctttgccaagtgttccagccaccggcccagggcaatgaacacaaagagcatggggggagtgt

SEQ ID NO: 10562 - RNA, 85 nt, synthetic construct
  source 1..85: mol_type = other RNA
tctgaacctgaagctgctgttacctttgccaagtgttccagccaccggcccagggcaatgaacacaaagagcatggggggcgtgt

SEQ ID NO: 10563 - RNA, 86 nt, synthetic construct
  source 1..86: mol_type = other RNA
ttctgaacctgaagctgctgttacctttgccaagtgttccagccaccggcccagggcaatgaacacaaagagcatggggggagtgt

SEQ ID NO: 10564 - RNA, 86 nt, synthetic construct
  source 1..86: mol_type = other RNA
ttctgaacctgaagctgctgttacctttgccaagtgttccagccaccggcccagggcaatgaacacaaagagcatggggggggtgt

SEQ ID NO: 10565 - RNA, 86 nt, synthetic construct
  source 1..86: mol_type = other RNA
ttctgaacctgaagctgctgttacctttgccaagtgttccagccaccggcccagggcaatgaacacaaagagcatggggggcgtgt

SEQ ID NO: 10566 - RNA, 86 nt, synthetic construct
  source 1..86: mol_type = other RNA
ttctgaacctgaagctgctgttacctttgccaagtgttccagccaccggcccagggcaatgaacacaaagagcatggggggtgtgt

SEQ ID NO: 10567 - RNA, 87 nt, synthetic construct
  source 1..87: mol_type = other RNA
tttctgaacctgaagctgctgttacctttgccaagtgttccagccaccggcccagggcaatgaacacaaagagcatggggggcgtgt

SEQ ID NO: 10568 - RNA, 87 nt, synthetic construct
  source 1..87: mol_type = other RNA
tttctgaacctgaagctgctgttacctttgccaagtgttccagccaccggcccagggcaatgaacacaaagagcatggggggtgtgt

SEQ ID NO: 10569 - RNA, 87 nt, synthetic construct
  source 1..87: mol_type = other RNA
tttctgaacctgaagctgctgttacctttgccaagtgttccagccaccggcccagggcaatgaacacaaagagcatggggggggtgt

SEQ ID NO: 10570 - RNA, 87 nt, synthetic construct
  source 1..87: mol_type = other RNA
tttctgaacctgaagctgctgttacctttgccaagtgttccagccaccggcccagggcaatgaacacaaagagcatggggggagtgt

SEQ ID NO: 10571 - RNA, 88 nt, synthetic construct
  source 1..88: mol_type = other RNA
ttttctgaacctgaagctgctgttacctttgccaagtgttccagccaccggcccagggcaatgaacacaaagagcatggggggagtgt

SEQ ID NO: 10572 - RNA, 88 nt, synthetic construct
  source 1..88: mol_type = other RNA
ttttctgaacctgaagctgctgttacctttgccaagtgttccagccaccggcccagggcaatgaacacaaagagcatggggggcgtgt

SEQ ID NO: 10573 - RNA, 88 nt, synthetic construct
  source 1..88: mol_type = other RNA
ttttctgaacctgaagctgctgttacctttgccaagtgttccagccaccggcccagggcaatgaacacaaagagcatggggggtgtgt

SEQ ID NO: 10574 - RNA, 88 nt, synthetic construct
  source 1..88: mol_type = other RNA
ttttctgaacctgaagctgctgttacctttgccaagtgttccagccaccggcccagggcaatgaacacaaagagcatggggggggtgt

SEQ ID NO: 10575 - RNA, 89 nt, synthetic construct
  source 1..89: mol_type = other RNA
cttttctgaacctgaagctgctgttacctttgccaagtgttccagccaccggcccagggcaatgaacacaaagagcatggggggggtgt

SEQ ID NO: 10576 - RNA, 89 nt, synthetic construct
  source 1..89: mol_type = other RNA
cttttctgaacctgaagctgctgttacctttgccaagtgttccagccaccggcccagggcaatgaacacaaagagcatggggggtgtgt

SEQ ID NO: 10577 - RNA, 89 nt, synthetic construct
  source 1..89: mol_type = other RNA
cttttctgaacctgaagctgctgttacctttgccaagtgttccagccaccggcccagggcaatgaacacaaagagcatggggggagtgt

SEQ ID NO: 10578 - RNA, 89 nt, synthetic construct
  source 1..89: mol_type = other RNA
cttttctgaacctgaagctgctgttacctttgccaagtgttccagccaccggcccagggcaatgaacacaaagagcatggggggcgtgt

SEQ ID NO: 10579 - RNA, 90 nt, synthetic construct
  source 1..90: mol_type = other RNA
tcttttctgaacctgaagctgctgttacctttgccaagtgttccagccaccggcccagggcaatgaacacaaagagcatggggggtgtgt

SEQ ID NO: 10580 - RNA, 90 nt, synthetic construct
  source 1..90: mol_type = other RNA
tcttttctgaacctgaagctgctgttacctttgccaagtgttccagccaccggcccagggcaatgaacacaaagagcatggggggggtgt

SEQ ID NO: 10581 - RNA, 90 nt, synthetic construct
  source 1..90: mol_type = other RNA
tcttttctgaacctgaagctgctgttacctttgccaagtgttccagccaccggcccagggcaatgaacacaaagagcatggggggcgtgt

SEQ ID NO: 10582 - RNA, 90 nt, synthetic construct
  source 1..90: mol_type = other RNA
tcttttctgaacctgaagctgctgttacctttgccaagtgttccagccaccggcccagggcaatgaacacaaagagcatggggggagtgt

SEQ ID NO: 10583 - RNA, 91 nt, synthetic construct
  source 1..91: mol_type = other RNA
ctcttttctgaacctgaagctgctgttacctttgccaagtgttccagccaccggcccagggcaatgaacacaaagagcatggggggggtgt

SEQ ID NO: 10584 - RNA, 91 nt, synthetic construct
  source 1..91: mol_type = other RNA
ctcttttctgaacctgaagctgctgttacctttgccaagtgttccagccaccggcccagggcaatgaacacaaagagcatggggggagtgt

SEQ ID NO: 10585 - RNA, 91 nt, synthetic construct
  source 1..91: mol_type = other RNA
ctcttttctgaacctgaagctgctgttacctttgccaagtgttccagccaccggcccagggcaatgaacacaaagagcatggggggtgtgt

SEQ ID NO: 10586 - RNA, 91 nt, synthetic construct
  source 1..91: mol_type = other RNA
ctcttttctgaacctgaagctgctgttacctttgccaagtgttccagccaccggcccagggcaatgaacacaaagagcatggggggcgtgt

SEQ ID NO: 10587 - RNA, 92 nt, synthetic construct
  source 1..92: mol_type = other RNA
gctcttttctgaacctgaagctgctgttacctttgccaagtgttccagccaccggcccagggcaatgaacacaaagagcatggggggggtgt

SEQ ID NO: 10588 - RNA, 92 nt, synthetic construct
  source 1..92: mol_type = other RNA
gctcttttctgaacctgaagctgctgttacctttgccaagtgttccagccaccggcccagggcaatgaacacaaagagcatggggggcgtgt

SEQ ID NO: 10589 - RNA, 92 nt, synthetic construct
  source 1..92: mol_type = other RNA
gctcttttctgaacctgaagctgctgttacctttgccaagtgttccagccaccggcccagggcaatgaacacaaagagcatggggggagtgt

SEQ ID NO: 10590 - RNA, 92 nt, synthetic construct
  source 1..92: mol_type = other RNA
gctcttttctgaacctgaagctgctgttacctttgccaagtgttccagccaccggcccagggcaatgaacacaaagagcatggggggtgtgt

SEQ ID NO: 10591 - RNA, 93 nt, synthetic construct
  source 1..93: mol_type = other RNA
agctcttttctgaacctgaagctgctgttacctttgccaagtgttccagccaccggcccagggcaatgaacacaaagagcatggggggcgtgt

SEQ ID NO: 10592 - RNA, 93 nt, synthetic construct
  source 1..93: mol_type = other RNA
agctcttttctgaacctgaagctgctgttacctttgccaagtgttccagccaccggcccagggcaatgaacacaaagagcatggggggtgtgt

SEQ ID NO: 10593 - RNA, 93 nt, synthetic construct
  source 1..93: mol_type = other RNA
agctcttttctgaacctgaagctgctgttacctttgccaagtgttccagccaccggcccagggcaatgaacacaaagagcatggggggggtgt

SEQ ID NO: 10594 - RNA, 93 nt, synthetic construct
  source 1..93: mol_type = other RNA
agctcttttctgaacctgaagctgctgttacctttgccaagtgttccagccaccggcccagggcaatgaacacaaagagcatggggggagtgt

SEQ ID NO: 10595 - RNA, 94 nt, synthetic construct
  source 1..94: mol_type = other RNA
cagctcttttctgaacctgaagctgctgttacctttgccaagtgttccagccaccggcccagggcaatgaacacaaagagcatggggggggtgt

SEQ ID NO: 10596 - RNA, 94 nt, synthetic construct
  source 1..94: mol_type = other RNA
cagctcttttctgaacctgaagctgctgttacctttgccaagtgttccagccaccggcccagggcaatgaacacaaagagcatggggggcgtgt

SEQ ID NO: 10597 - RNA, 94 nt, synthetic construct
  source 1..94: mol_type = other RNA
cagctcttttctgaacctgaagctgctgttacctttgccaagtgttccagccaccggcccagggcaatgaacacaaagagcatggggggagtgt

SEQ ID NO: 10598 - RNA, 94 nt, synthetic construct
  source 1..94: mol_type = other RNA
cagctcttttctgaacctgaagctgctgttacctttgccaagtgttccagccaccggcccagggcaatgaacacaaagagcatggggggtgtgt

SEQ ID NO: 10599 - RNA, 95 nt, synthetic construct
  source 1..95: mol_type = other RNA
gcagctcttttctgaacctgaagctgctgttacctttgccaagtgttccagccaccggcccagggcaatgaacacaaagagcatggggggtgtgt

SEQ ID NO: 10600 - RNA, 95 nt, synthetic construct
  source 1..95: mol_type = other RNA
gcagctcttttctgaacctgaagctgctgttacctttgccaagtgttccagccaccggcccagggcaatgaacacaaagagcatggggggggtgt

SEQ ID NO: 10601 - RNA, 95 nt, synthetic construct
  source 1..95: mol_type = other RNA
gcagctcttttctgaacctgaagctgctgttacctttgccaagtgttccagccaccggcccagggcaatgaacacaaagagcatggggggcgtgt

SEQ ID NO: 10602 - RNA, 95 nt, synthetic construct
  source 1..95: mol_type = other RNA
gcagctcttttctgaacctgaagctgctgttacctttgccaagtgttccagccaccggcccagggcaatgaacacaaagagcatggggggagtgt

SEQ ID NO: 10603 - RNA, 96 nt, synthetic construct
  source 1..96: mol_type = other RNA
agcagctcttttctgaacctgaagctgctgttacctttgccaagtgttccagccaccggcccagggcaatgaacacaaagagcatggggggggtgt

SEQ ID NO: 10604 - RNA, 96 nt, synthetic construct
  source 1..96: mol_type = other RNA
agcagctcttttctgaacctgaagctgctgttacctttgccaagtgttccagccaccggcccagggcaatgaacacaaagagcatggggggagtgt

SEQ ID NO: 10605 - RNA, 96 nt, synthetic construct
  source 1..96: mol_type = other RNA
agcagctcttttctgaacctgaagctgctgttacctttgccaagtgttccagccaccggcccagggcaatgaacacaaagagcatggggggcgtgt

SEQ ID NO: 10606 - RNA, 96 nt, synthetic construct
  source 1..96: mol_type = other RNA
agcagctcttttctgaacctgaagctgctgttacctttgccaagtgttccagccaccggcccagggcaatgaacacaaagagcatggggggtgtgt

SEQ ID NO: 10607 - RNA, 97 nt, synthetic construct
  source 1..97: mol_type = other RNA
gagcagctcttttctgaacctgaagctgctgttacctttgccaagtgttccagccaccggcccagggcaatgaacacaaagagcatggggggtgtgt

SEQ ID NO: 10608 - RNA, 97 nt, synthetic construct
  source 1..97: mol_type = other RNA
gagcagctcttttctgaacctgaagctgctgttacctttgccaagtgttccagccaccggcccagggcaatgaacacaaagagcatggggggagtgt

SEQ ID NO: 10609 - RNA, 97 nt, synthetic construct
  source 1..97: mol_type = other RNA
gagcagctcttttctgaacctgaagctgctgttacctttgccaagtgttccagccaccggcccagggcaatgaacacaaagagcatggggggcgtgt

SEQ ID NO: 10610 - RNA, 97 nt, synthetic construct
  source 1..97: mol_type = other RNA
gagcagctcttttctgaacctgaagctgctgttacctttgccaagtgttccagccaccggcccagggcaatgaacacaaagagcatggggggggtgt

SEQ ID NO: 10611 - RNA, 98 nt, synthetic construct
  source 1..98: mol_type = other RNA
ggagcagctcttttctgaacctgaagctgctgttacctttgccaagtgttccagccaccggcccagggcaatgaacacaaagagcatggggggagtgt

SEQ ID NO: 10612 - RNA, 98 nt, synthetic construct
  source 1..98: mol_type = other RNA
ggagcagctcttttctgaacctgaagctgctgttacctttgccaagtgttccagccaccggcccagggcaatgaacacaaagagcatggggggggtgt

SEQ ID NO: 10613 - RNA, 98 nt, synthetic construct
  source 1..98: mol_type = other RNA
ggagcagctcttttctgaacctgaagctgctgttacctttgccaagtgttccagccaccggcccagggcaatgaacacaaagagcatggggggtgtgt

SEQ ID NO: 10614 - RNA, 98 nt, synthetic construct
  source 1..98: mol_type = other RNA
ggagcagctcttttctgaacctgaagctgctgttacctttgccaagtgttccagccaccggcccagggcaatgaacacaaagagcatggggggcgtgt

SEQ ID NO: 10615 - RNA, 99 nt, synthetic construct
  source 1..99: mol_type = other RNA
aggagcagctcttttctgaacctgaagctgctgttacctttgccaagtgttccagccaccggcccagggcaatgaacacaaagagcatggggggggtgt

SEQ ID NO: 10616 - RNA, 99 nt, synthetic construct
  source 1..99: mol_type = other RNA
aggagcagctcttttctgaacctgaagctgctgttacctttgccaagtgttccagccaccggcccagggcaatgaacacaaagagcatggggggcgtgt

SEQ ID NO: 10617 - RNA, 99 nt, synthetic construct
  source 1..99: mol_type = other RNA
aggagcagctcttttctgaacctgaagctgctgttacctttgccaagtgttccagccaccggcccagggcaatgaacacaaagagcatggggggagtgt

SEQ ID NO: 10618 - RNA, 99 nt, synthetic construct
  source 1..99: mol_type = other RNA
aggagcagctcttttctgaacctgaagctgctgttacctttgccaagtgttccagccaccggcccagggcaatgaacacaaagagcatggggggtgtgt

SEQ ID NO: 10619 - RNA, 100 nt, synthetic construct
  source 1..100: mol_type = other RNA
aaggagcagctcttttctgaacctgaagctgctgttacctttgccaagtgttccagccaccggcccagggcaatgaacacaaagagcatggggggtgtgt

SEQ ID NO: 10620 - RNA, 100 nt, synthetic construct
  source 1..100: mol_type = other RNA
aaggagcagctcttttctgaacctgaagctgctgttacctttgccaagtgttccagccaccggcccagggcaatgaacacaaagagcatggggggcgtgt

SEQ ID NO: 10621 - RNA, 100 nt, synthetic construct
  source 1..100: mol_type = other RNA
aaggagcagctcttttctgaacctgaagctgctgttacctttgccaagtgttccagccaccggcccagggcaatgaacacaaagagcatggggggagtgt

SEQ ID NO: 10622 - RNA, 100 nt, synthetic construct
  source 1..100: mol_type = other RNA
aaggagcagctcttttctgaacctgaagctgctgttacctttgccaagtgttccagccaccggcccagggcaatgaacacaaagagcatggggggggtgt

SEQ ID NO: 10623 - RNA, 20 nt, synthetic construct
  source 1..20: mol_type = other RNA
cacaaagagcatggggggtg

SEQ ID NO: 10624 - RNA, 20 nt, synthetic construct
  source 1..20: mol_type = other RNA
cacaaagagcatggggggag

SEQ ID NO: 10625 - RNA, 20 nt, synthetic construct
  source 1..20: mol_type = other RNA
gagcatggggggggtgtcga

SEQ ID NO: 10626 - RNA, 20 nt, synthetic construct
  source 1..20: mol_type = other RNA
aaagagcatggggggggtgt

SEQ ID NO: 10627 - RNA, 20 nt, synthetic construct
  source 1..20: mol_type = other RNA
gagcatggggggtgtgtcga

SEQ ID NO: 10628 - RNA, 20 nt, synthetic construct
  source 1..20: mol_type = other RNA
aaagagcatggggggagtgt

SEQ ID NO: 10629 - RNA, 20 nt, synthetic construct
  source 1..20: mol_type = other RNA
aaagagcatggggggtgtgt

SEQ ID NO: 10630 - RNA, 20 nt, synthetic construct
  source 1..20: mol_type = other RNA
gagcatggggggagtgtcga

SEQ ID NO: 10631 - RNA, 20 nt, synthetic construct
  source 1..20: mol_type = other RNA
cacaaagagcatgggggggg

SEQ ID NO: 10632 - RNA, 16 nt, synthetic construct
  source 1..16: mol_type = other RNA
ttcgacacgcccccca

SEQ ID NO: 10633 - RNA, 17 nt, synthetic construct
  source 1..17: mol_type = other RNA
cttcgacacgcccccca

SEQ ID NO: 10634 - RNA, 18 nt, synthetic construct
  source 1..18: mol_type = other RNA
tcttcgacacgcccccca

SEQ ID NO: 10635 - RNA, 19 nt, synthetic construct
  source 1..19: mol_type = other RNA
ttcttcgacacgcccccca

SEQ ID NO: 10636 - RNA, 20 nt, synthetic construct
  source 1..20: mol_type = other RNA
attcttcgacacgcccccca

SEQ ID NO: 10637 - RNA, 21 nt, synthetic construct
  source 1..21: mol_type = other RNA
cattcttcgacacgcccccca

SEQ ID NO: 10638 - RNA, 22 nt, synthetic construct
  source 1..22: mol_type = other RNA
acattcttcgacacgcccccca

SEQ ID NO: 10639-10645 - skipped (7 entries)

SEQ ID NO: 10646 - RNA, 10 nt, synthetic construct
  source 1..10: mol_type = other RNA
ggggcgtgtc

SEQ ID NO: 10647 - RNA, 11 nt, synthetic construct
  source 1..11: mol_type = other RNA
ggggcgtgtcg

SEQ ID NO: 10648 - RNA, 12 nt, synthetic construct
  source 1..12: mol_type = other RNA
ggggcgtgtcga

SEQ ID NO: 10649 - RNA, 13 nt, synthetic construct
  source 1..13: mol_type = other RNA
ggggcgtgtcgaa

SEQ ID NO: 10650 - RNA, 14 nt, synthetic construct
  source 1..14: mol_type = other RNA
ggggcgtgtcgaag

SEQ ID NO: 10651 - RNA, 15 nt, synthetic construct
  source 1..15: mol_type = other RNA
ggggcgtgtcgaaga

SEQ ID NO: 10652 - RNA, 16 nt, synthetic construct
  source 1..16: mol_type = other RNA
ggggcgtgtcgaagaa

SEQ ID NO: 10653 - RNA, 17 nt, synthetic construct
  source 1..17: mol_type = other RNA
ggggcgtgtcgaagaat

SEQ ID NO: 10654 - RNA, 18 nt, synthetic construct
  source 1..18: mol_type = other RNA
ggggcgtgtcgaagaatg

SEQ ID NO: 10655 - RNA, 19 nt, synthetic construct
  source 1..19: mol_type = other RNA
ggggcgtgtcgaagaatgt

SEQ ID NO: 10656 - RNA, 31 nt, synthetic construct
  source 1..31: mol_type = other RNA
cggcccagggcaatgaacacaaagagcatgg

SEQ ID NO: 10657 - RNA, 32 nt, synthetic construct
  source 1..32: mol_type = other RNA
ccggcccagggcaatgaacacaaagagcatgg

SEQ ID NO: 10658 - RNA, 33 nt, synthetic construct
  source 1..33: mol_type = other RNA
accggcccagggcaatgaacacaaagagcatgg

SEQ ID NO: 10659 - RNA, 34 nt, synthetic construct
  source 1..34: mol_type = other RNA
caccggcccagggcaatgaacacaaagagcatgg

SEQ ID NO: 10660 - RNA, 35 nt, synthetic construct
  source 1..35: mol_type = other RNA
ccaccggcccagggcaatgaacacaaagagcatgg

SEQ ID NO: 10661 - RNA, 36 nt, synthetic construct
  source 1..36: mol_type = other RNA
gccaccggcccagggcaatgaacacaaagagcatgg

SEQ ID NO: 10662 - RNA, 37 nt, synthetic construct
  source 1..37: mol_type = other RNA
agccaccggcccagggcaatgaacacaaagagcatgg

SEQ ID NO: 10663 - RNA, 38 nt, synthetic construct
  source 1..38: mol_type = other RNA
cagccaccggcccagggcaatgaacacaaagagcatgg

SEQ ID NO: 10664 - RNA, 39 nt, synthetic construct
  source 1..39: mol_type = other RNA
ccagccaccggcccagggcaatgaacacaaagagcatgg

SEQ ID NO: 10665 - RNA, 40 nt, synthetic construct
  source 1..40: mol_type = other RNA
tccagccaccggcccagggcaatgaacacaaagagcatgg

SEQ ID NO: 10666 - RNA, 41 nt, synthetic construct
  source 1..41: mol_type = other RNA
ttccagccaccggcccagggcaatgaacacaaagagcatgg

SEQ ID NO: 10667 - RNA, 42 nt, synthetic construct
  source 1..42: mol_type = other RNA
gttccagccaccggcccagggcaatgaacacaaagagcatgg

SEQ ID NO: 10668 - RNA, 43 nt, synthetic construct
  source 1..43: mol_type = other RNA
tgttccagccaccggcccagggcaatgaacacaaagagcatgg

SEQ ID NO: 10669 - RNA, 44 nt, synthetic construct
  source 1..44: mol_type = other RNA
gtgttccagccaccggcccagggcaatgaacacaaagagcatgg

SEQ ID NO: 10670 - RNA, 45 nt, synthetic construct
  source 1..45: mol_type = other RNA
agtgttccagccaccggcccagggcaatgaacacaaagagcatgg

SEQ ID NO: 10671 - RNA, 46 nt, synthetic construct
  source 1..46: mol_type = other RNA
aagtgttccagccaccggcccagggcaatgaacacaaagagcatgg

SEQ ID NO: 10672 - RNA, 47 nt, synthetic construct
  source 1..47: mol_type = other RNA
caagtgttccagccaccggcccagggcaatgaacacaaagagcatgg

SEQ ID NO: 10673 - RNA, 48 nt, synthetic construct
  source 1..48: mol_type = other RNA
ccaagtgttccagccaccggcccagggcaatgaacacaaagagcatgg

SEQ ID NO: 10674 - RNA, 49 nt, synthetic construct
  source 1..49: mol_type = other RNA
gccaagtgttccagccaccggcccagggcaatgaacacaaagagcatgg

SEQ ID NO: 10675 - RNA, 50 nt, synthetic construct
  source 1..50: mol_type = other RNA
tgccaagtgttccagccaccggcccagggcaatgaacacaaagagcatgg

SEQ ID NO: 10676 - RNA, 51 nt, synthetic construct
  source 1..51: mol_type = other RNA
ttgccaagtgttccagccaccggcccagggcaatgaacacaaagagcatgg

SEQ ID NO: 10677 - RNA, 52 nt, synthetic construct
  source 1..52: mol_type = other RNA
tttgccaagtgttccagccaccggcccagggcaatgaacacaaagagcatgg

SEQ ID NO: 10678 - RNA, 53 nt, synthetic construct
  source 1..53: mol_type = other RNA
ctttgccaagtgttccagccaccggcccagggcaatgaacacaaagagcatgg

SEQ ID NO: 10679 - RNA, 54 nt, synthetic construct
  source 1..54: mol_type = other RNA
cctttgccaagtgttccagccaccggcccagggcaatgaacacaaagagcatgg

SEQ ID NO: 10680 - RNA, 55 nt, synthetic construct
  source 1..55: mol_type = other RNA
acctttgccaagtgttccagccaccggcccagggcaatgaacacaaagagcatgg

SEQ ID NO: 10681 - RNA, 56 nt, synthetic construct
  source 1..56: mol_type = other RNA
tacctttgccaagtgttccagccaccggcccagggcaatgaacacaaagagcatgg

SEQ ID NO: 10682 - RNA, 57 nt, synthetic construct
  source 1..57: mol_type = other RNA
ttacctttgccaagtgttccagccaccggcccagggcaatgaacacaaagagcatgg

SEQ ID NO: 10683 - RNA, 58 nt, synthetic construct
  source 1..58: mol_type = other RNA
gttacctttgccaagtgttccagccaccggcccagggcaatgaacacaaagagcatgg

SEQ ID NO: 10684 - RNA, 59 nt, synthetic construct
  source 1..59: mol_type = other RNA
tgttacctttgccaagtgttccagccaccggcccagggcaatgaacacaaagagcatgg

SEQ ID NO: 10685 - RNA, 60 nt, synthetic construct
  source 1..60: mol_type = other RNA
ctgttacctttgccaagtgttccagccaccggcccagggcaatgaacacaaagagcatgg

SEQ ID NO: 10686 - RNA, 61 nt, synthetic construct
  source 1..61: mol_type = other RNA
gctgttacctttgccaagtgttccagccaccggcccagggcaatgaacacaaagagcatgg

SEQ ID NO: 10687 - RNA, 62 nt, synthetic construct
  source 1..62: mol_type = other RNA
tgctgttacctttgccaagtgttccagccaccggcccagggcaatgaacacaaagagcatgg

SEQ ID NO: 10688 - RNA, 63 nt, synthetic construct
  source 1..63: mol_type = other RNA
ctgctgttacctttgccaagtgttccagccaccggcccagggcaatgaacacaaagagcatgg

SEQ ID NO: 10689 - RNA, 64 nt, synthetic construct
  source 1..64: mol_type = other RNA
gctgctgttacctttgccaagtgttccagccaccggcccagggcaatgaacacaaagagcatgg

SEQ ID NO: 10690 - RNA, 65 nt, synthetic construct
  source 1..65: mol_type = other RNA
agctgctgttacctttgccaagtgttccagccaccggcccagggcaatgaacacaaagagcatgg

SEQ ID NO: 10691 - RNA, 66 nt, synthetic construct
  source 1..66: mol_type = other RNA
aagctgctgttacctttgccaagtgttccagccaccggcccagggcaatgaacacaaagagcatgg

SEQ ID NO: 10692 - RNA, 67 nt, synthetic construct
  source 1..67: mol_type = other RNA
gaagctgctgttacctttgccaagtgttccagccaccggcccagggcaatgaacacaaagagcatgg

SEQ ID NO: 10693 - RNA, 68 nt, synthetic construct
  source 1..68: mol_type = other RNA
tgaagctgctgttacctttgccaagtgttccagccaccggcccagggcaatgaacacaaagagcatgg

SEQ ID NO: 10694 - RNA, 69 nt, synthetic construct
  source 1..69: mol_type = other RNA
ctgaagctgctgttacctttgccaagtgttccagccaccggcccagggcaatgaacacaaagagcatgg

SEQ ID NO: 10695 - RNA, 70 nt, synthetic construct
  source 1..70: mol_type = other RNA
cctgaagctgctgttacctttgccaagtgttccagccaccggcccagggcaatgaacacaaagagcatgg

SEQ ID NO: 10696 - RNA, 71 nt, synthetic construct
  source 1..71: mol_type = other RNA
acctgaagctgctgttacctttgccaagtgttccagccaccggcccagggcaatgaacacaaagagcatgg

SEQ ID NO: 10697 - RNA, 72 nt, synthetic construct
  source 1..72: mol_type = other RNA
aacctgaagctgctgttacctttgccaagtgttccagccaccggcccagggcaatgaacacaaagagcatgg

SEQ ID NO: 10698 - RNA, 73 nt, synthetic construct
  source 1..73: mol_type = other RNA
gaacctgaagctgctgttacctttgccaagtgttccagccaccggcccagggcaatgaacacaaagagcatgg

SEQ ID NO: 10699 - RNA, 74 nt, synthetic construct
  source 1..74: mol_type = other RNA
tgaacctgaagctgctgttacctttgccaagtgttccagccaccggcccagggcaatgaacacaaagagcatgg

SEQ ID NO: 10700 - RNA, 75 nt, synthetic construct
  source 1..75: mol_type = other RNA
ctgaacctgaagctgctgttacctttgccaagtgttccagccaccggcccagggcaatgaacacaaagagcatgg

SEQ ID NO: 10701 - RNA, 76 nt, synthetic construct
  source 1..76: mol_type = other RNA
tctgaacctgaagctgctgttacctttgccaagtgttccagccaccggcccagggcaatgaacacaaagagcatgg

SEQ ID NO: 10702 - RNA, 77 nt, synthetic construct
  source 1..77: mol_type = other RNA
ttctgaacctgaagctgctgttacctttgccaagtgttccagccaccggcccagggcaatgaacacaaagagcatgg

SEQ ID NO: 10703 - RNA, 78 nt, synthetic construct
  source 1..78: mol_type = other RNA
tttctgaacctgaagctgctgttacctttgccaagtgttccagccaccggcccagggcaatgaacacaaagagcatgg

SEQ ID NO: 10704 - RNA, 79 nt, synthetic construct
  source 1..79: mol_type = other RNA
ttttctgaacctgaagctgctgttacctttgccaagtgttccagccaccggcccagggcaatgaacacaaagagcatgg

SEQ ID NO: 10705 - RNA, 80 nt, synthetic construct
  source 1..80: mol_type = other RNA
cttttctgaacctgaagctgctgttacctttgccaagtgttccagccaccggcccagggcaatgaacacaaagagcatgg

SEQ ID NO: 10706 - RNA, 81 nt, synthetic construct
  source 1..81: mol_type = other RNA
tcttttctgaacctgaagctgctgttacctttgccaagtgttccagccaccggcccagggcaatgaacacaaagagcatgg

SEQ ID NO: 10707 - RNA, 82 nt, synthetic construct
  source 1..82: mol_type = other RNA
ctcttttctgaacctgaagctgctgttacctttgccaagtgttccagccaccggcccagggcaatgaacacaaagagcatgg

SEQ ID NO: 10708 - RNA, 83 nt, synthetic construct
  source 1..83: mol_type = other RNA
gctcttttctgaacctgaagctgctgttacctttgccaagtgttccagccaccggcccagggcaatgaacacaaagagcatgg

SEQ ID NO: 10709 - RNA, 84 nt, synthetic construct
  source 1..84: mol_type = other RNA
agctcttttctgaacctgaagctgctgttacctttgccaagtgttccagccaccggcccagggcaatgaacacaaagagcatgg

SEQ ID NO: 10710 - RNA, 85 nt, synthetic construct
  source 1..85: mol_type = other RNA
cagctcttttctgaacctgaagctgctgttacctttgccaagtgttccagccaccggcccagggcaatgaacacaaagagcatgg

SEQ ID NO: 10711 - RNA, 86 nt, synthetic construct
  source 1..86: mol_type = other RNA
gcagctcttttctgaacctgaagctgctgttacctttgccaagtgttccagccaccggcccagggcaatgaacacaaagagcatgg

SEQ ID NO: 10712 - RNA, 87 nt, synthetic construct
  source 1..87: mol_type = other RNA
agcagctcttttctgaacctgaagctgctgttacctttgccaagtgttccagccaccggcccagggcaatgaacacaaagagcatgg

SEQ ID NO: 10713 - RNA, 88 nt, synthetic construct
  source 1..88: mol_type = other RNA
gagcagctcttttctgaacctgaagctgctgttacctttgccaagtgttccagccaccggcccagggcaatgaacacaaagagcatgg

SEQ ID NO: 10714 - RNA, 89 nt, synthetic construct
  source 1..89: mol_type = other RNA
ggagcagctcttttctgaacctgaagctgctgttacctttgccaagtgttccagccaccggcccagggcaatgaacacaaagagcatgg

SEQ ID NO: 10715 - RNA, 90 nt, synthetic construct
  source 1..90: mol_type = other RNA
aggagcagctcttttctgaacctgaagctgctgttacctttgccaagtgttccagccaccggcccagggcaatgaacacaaagagcatgg

SEQ ID NO: 10716 - RNA, 91 nt, synthetic construct
  source 1..91: mol_type = other RNA
aaggagcagctcttttctgaacctgaagctgctgttacctttgccaagtgttccagccaccggcccagggcaatgaacacaaagagcatgg

SEQ ID NO: 10717 - RNA, 92 nt, synthetic construct
  source 1..92: mol_type = other RNA
gaaggagcagctcttttctgaacctgaagctgctgttacctttgccaagtgttccagccaccggcccagggcaatgaacacaaagagcatgg

SEQ ID NO: 10718 - RNA, 93 nt, synthetic construct
  source 1..93: mol_type = other RNA
tgaaggagcagctcttttctgaacctgaagctgctgttacctttgccaagtgttccagccaccggcccagggcaatgaacacaaagagcatgg

SEQ ID NO: 10719 - RNA, 94 nt, synthetic construct
  source 1..94: mol_type = other RNA
ctgaaggagcagctcttttctgaacctgaagctgctgttacctttgccaagtgttccagccaccggcccagggcaatgaacacaaagagcatgg

SEQ ID NO: 10720 - RNA, 95 nt, synthetic construct
  source 1..95: mol_type = other RNA
actgaaggagcagctcttttctgaacctgaagctgctgttacctttgccaagtgttccagccaccggcccagggcaatgaacacaaagagcatgg

SEQ ID NO: 10721 - RNA, 96 nt, synthetic construct
  source 1..96: mol_type = other RNA
tactgaaggagcagctcttttctgaacctgaagctgctgttacctttgccaagtgttccagccaccggcccagggcaatgaacacaaagagcatgg

SEQ ID NO: 10722 - RNA, 97 nt, synthetic construct
  source 1..97: mol_type = other RNA
ttactgaaggagcagctcttttctgaacctgaagctgctgttacctttgccaagtgttccagccaccggcccagggcaatgaacacaaagagcatgg

SEQ ID NO: 10723 - RNA, 98 nt, synthetic construct
  source 1..98: mol_type = other RNA
tttactgaaggagcagctcttttctgaacctgaagctgctgttacctttgccaagtgttccagccaccggcccagggcaatgaacacaaagagcatgg

SEQ ID NO: 10724 - RNA, 99 nt, synthetic construct
  source 1..99: mol_type = other RNA
gtttactgaaggagcagctcttttctgaacctgaagctgctgttacctttgccaagtgttccagccaccggcccagggcaatgaacacaaagagcatgg

SEQ ID NO: 10725 - RNA, 100 nt, synthetic construct
  source 1..100: mol_type = other RNA
tgtttactgaaggagcagctcttttctgaacctgaagctgctgttacctttgccaagtgttccagccaccggcccagggcaatgaacacaaagagcatgg

SEQ ID NO: 10726 - RNA, 16 nt, synthetic construct
  source 1..16: mol_type = other RNA
cgccccccatgctctt

SEQ ID NO: 10727 - RNA, 17 nt, synthetic construct
  source 1..17: mol_type = other RNA
acgccccccatgctctt

SEQ ID NO: 10728 - RNA, 18 nt, synthetic construct
  source 1..18: mol_type = other RNA
cacgccccccatgctctt

SEQ ID NO: 10729 - RNA, 19 nt, synthetic construct
  source 1..19: mol_type = other RNA
acacgccccccatgctctt

SEQ ID NO: 10730 - RNA, 20 nt, synthetic construct
  source 1..20: mol_type = other RNA
gacacgccccccatgctctt

SEQ ID NO: 10731 - RNA, 21 nt, synthetic construct
  source 1..21: mol_type = other RNA
cgacacgccccccatgctctt

SEQ ID NO: 10732 - RNA, 22 nt, synthetic construct
  source 1..22: mol_type = other RNA
tcgacacgccccccatgctctt

SEQ ID NO: 10733-10738 - skipped (6 entries)

SEQ ID NO: 10739 - RNA, 10 nt, synthetic construct
  source 1..10: mol_type = other RNA
agcatggggg

SEQ ID NO: 10740 - RNA, 11 nt, synthetic construct
  source 1..11: mol_type = other RNA
agcatgggggg

SEQ ID NO: 10741 - RNA, 12 nt, synthetic construct
  source 1..12: mol_type = other RNA
agcatggggggc

SEQ ID NO: 10742 - RNA, 13 nt, synthetic construct
  source 1..13: mol_type = other RNA
agcatggggggcg

SEQ ID NO: 10743 - RNA, 14 nt, synthetic construct
  source 1..14: mol_type = other RNA
agcatggggggcgt

SEQ ID NO: 10744 - RNA, 15 nt, synthetic construct
  source 1..15: mol_type = other RNA
agcatggggggcgtg

SEQ ID NO: 10745 - RNA, 16 nt, synthetic construct
  source 1..16: mol_type = other RNA
agcatggggggcgtgt

SEQ ID NO: 10746 - RNA, 17 nt, synthetic construct
  source 1..17: mol_type = other RNA
agcatggggggcgtgtc

SEQ ID NO: 10747 - RNA, 18 nt, synthetic construct
  source 1..18: mol_type = other RNA
agcatggggggcgtgtcg

SEQ ID NO: 10748 - RNA, 19 nt, synthetic construct
  source 1..19: mol_type = other RNA
agcatggggggcgtgtcga

SEQ ID NO: 10749 - RNA, 24 nt, synthetic construct
  source 1..24: mol_type = other RNA
cggcccagggcaatgaacacaaag

SEQ ID NO: 10750 - RNA, 25 nt, synthetic construct
  source 1..25: mol_type = other RNA
ccggcccagggcaatgaacacaaag

SEQ ID NO: 10751 - RNA, 26 nt, synthetic construct
  source 1..26: mol_type = other RNA
accggcccagggcaatgaacacaaag

SEQ ID NO: 10752 - RNA, 27 nt, synthetic construct
  source 1..27: mol_type = other RNA
caccggcccagggcaatgaacacaaag

SEQ ID NO: 10753 - RNA, 28 nt, synthetic construct
  source 1..28: mol_type = other RNA
ccaccggcccagggcaatgaacacaaag

SEQ ID NO: 10754 - RNA, 29 nt, synthetic construct
  source 1..29: mol_type = other RNA
gccaccggcccagggcaatgaacacaaag

SEQ ID NO: 10755 - RNA, 30 nt, synthetic construct
  source 1..30: mol_type = other RNA
agccaccggcccagggcaatgaacacaaag

SEQ ID NO: 10756 - RNA, 31 nt, synthetic construct
  source 1..31: mol_type = other RNA
cagccaccggcccagggcaatgaacacaaag

SEQ ID NO: 10757 - RNA, 32 nt, synthetic construct
  source 1..32: mol_type = other RNA
ccagccaccggcccagggcaatgaacacaaag

SEQ ID NO: 10758 - RNA, 33 nt, synthetic construct
  source 1..33: mol_type = other RNA
tccagccaccggcccagggcaatgaacacaaag

SEQ ID NO: 10759 - RNA, 34 nt, synthetic construct
  source 1..34: mol_type = other RNA
ttccagccaccggcccagggcaatgaacacaaag

SEQ ID NO: 10760 - RNA, 35 nt, synthetic construct
  source 1..35: mol_type = other RNA
gttccagccaccggcccagggcaatgaacacaaag

SEQ ID NO: 10761 - RNA, 36 nt, synthetic construct
  source 1..36: mol_type = other RNA
tgttccagccaccggcccagggcaatgaacacaaag

SEQ ID NO: 10762 - RNA, 37 nt, synthetic construct
  source 1..37: mol_type = other RNA
gtgttccagccaccggcccagggcaatgaacacaaag

SEQ ID NO: 10763 - RNA, 38 nt, synthetic construct
  source 1..38: mol_type = other RNA
agtgttccagccaccggcccagggcaatgaacacaaag

SEQ ID NO: 10764 - RNA, 39 nt, synthetic construct
  source 1..39: mol_type = other RNA
aagtgttccagccaccggcccagggcaatgaacacaaag

SEQ ID NO: 10765 - RNA, 40 nt, synthetic construct
  source 1..40: mol_type = other RNA
caagtgttccagccaccggcccagggcaatgaacacaaag

SEQ ID NO: 10766 - RNA, 41 nt, synthetic construct
  source 1..41: mol_type = other RNA
ccaagtgttccagccaccggcccagggcaatgaacacaaag

SEQ ID NO: 10767 - RNA, 42 nt, synthetic construct
  source 1..42: mol_type = other RNA
gccaagtgttccagccaccggcccagggcaatgaacacaaag

SEQ ID NO: 10768 - RNA, 43 nt, synthetic construct
  source 1..43: mol_type = other RNA
tgccaagtgttccagccaccggcccagggcaatgaacacaaag

SEQ ID NO: 10769 - RNA, 44 nt, synthetic construct
  source 1..44: mol_type = other RNA
ttgccaagtgttccagccaccggcccagggcaatgaacacaaag

SEQ ID NO: 10770 - RNA, 45 nt, synthetic construct
  source 1..45: mol_type = other RNA
tttgccaagtgttccagccaccggcccagggcaatgaacacaaag

SEQ ID NO: 10771 - RNA, 46 nt, synthetic construct
  source 1..46: mol_type = other RNA
ctttgccaagtgttccagccaccggcccagggcaatgaacacaaag

SEQ ID NO: 10772 - RNA, 47 nt, synthetic construct
  source 1..47: mol_type = other RNA
cctttgccaagtgttccagccaccggcccagggcaatgaacacaaag

SEQ ID NO: 10773 - RNA, 48 nt, synthetic construct
  source 1..48: mol_type = other RNA
acctttgccaagtgttccagccaccggcccagggcaatgaacacaaag

SEQ ID NO: 10774 - RNA, 49 nt, synthetic construct
  source 1..49: mol_type = other RNA
tacctttgccaagtgttccagccaccggcccagggcaatgaacacaaag

SEQ ID NO: 10775 - RNA, 50 nt, synthetic construct
  source 1..50: mol_type = other RNA
ttacctttgccaagtgttccagccaccggcccagggcaatgaacacaaag

SEQ ID NO: 10776 - RNA, 51 nt, synthetic construct
  source 1..51: mol_type = other RNA
gttacctttgccaagtgttccagccaccggcccagggcaatgaacacaaag

SEQ ID NO: 10777 - RNA, 52 nt, synthetic construct
  source 1..52: mol_type = other RNA
tgttacctttgccaagtgttccagccaccggcccagggcaatgaacacaaag

SEQ ID NO: 10778 - RNA, 53 nt, synthetic construct
  source 1..53: mol_type = other RNA
ctgttacctttgccaagtgttccagccaccggcccagggcaatgaacacaaag

SEQ ID NO: 10779 - RNA, 54 nt, synthetic construct
  source 1..54: mol_type = other RNA
gctgttacctttgccaagtgttccagccaccggcccagggcaatgaacacaaag

SEQ ID NO: 10780 - RNA, 55 nt, synthetic construct
  source 1..55: mol_type = other RNA
tgctgttacctttgccaagtgttccagccaccggcccagggcaatgaacacaaag

SEQ ID NO: 10781 - RNA, 56 nt, synthetic construct
  source 1..56: mol_type = other RNA
ctgctgttacctttgccaagtgttccagccaccggcccagggcaatgaacacaaag

SEQ ID NO: 10782 - RNA, 57 nt, synthetic construct
  source 1..57: mol_type = other RNA
gctgctgttacctttgccaagtgttccagccaccggcccagggcaatgaacacaaag

SEQ ID NO: 10783 - RNA, 58 nt, synthetic construct
  source 1..58: mol_type = other RNA
agctgctgttacctttgccaagtgttccagccaccggcccagggcaatgaacacaaag

SEQ ID NO: 10784 - RNA, 59 nt, synthetic construct
  source 1..59: mol_type = other RNA
aagctgctgttacctttgccaagtgttccagccaccggcccagggcaatgaacacaaag

SEQ ID NO: 10785 - RNA, 60 nt, synthetic construct
  source 1..60: mol_type = other RNA
gaagctgctgttacctttgccaagtgttccagccaccggcccagggcaatgaacacaaag

SEQ ID NO: 10786 - RNA, 61 nt, synthetic construct
  source 1..61: mol_type = other RNA
tgaagctgctgttacctttgccaagtgttccagccaccggcccagggcaatgaacacaaag

SEQ ID NO: 10787 - RNA, 62 nt, synthetic construct
  source 1..62: mol_type = other RNA
ctgaagctgctgttacctttgccaagtgttccagccaccggcccagggcaatgaacacaaag

SEQ ID NO: 10788 - RNA, 63 nt, synthetic construct
  source 1..63: mol_type = other RNA
cctgaagctgctgttacctttgccaagtgttccagccaccggcccagggcaatgaacacaaag

SEQ ID NO: 10789 - RNA, 64 nt, synthetic construct
  source 1..64: mol_type = other RNA
acctgaagctgctgttacctttgccaagtgttccagccaccggcccagggcaatgaacacaaag

SEQ ID NO: 10790 - RNA, 65 nt, synthetic construct
  source 1..65: mol_type = other RNA
aacctgaagctgctgttacctttgccaagtgttccagccaccggcccagggcaatgaacacaaag

SEQ ID NO: 10791 - RNA, 66 nt, synthetic construct
  source 1..66: mol_type = other RNA
gaacctgaagctgctgttacctttgccaagtgttccagccaccggcccagggcaatgaacacaaag

SEQ ID NO: 10792 - RNA, 67 nt, synthetic construct
  source 1..67: mol_type = other RNA
tgaacctgaagctgctgttacctttgccaagtgttccagccaccggcccagggcaatgaacacaaag

SEQ ID NO: 10793 - RNA, 68 nt, synthetic construct
  source 1..68: mol_type = other RNA
ctgaacctgaagctgctgttacctttgccaagtgttccagccaccggcccagggcaatgaacacaaag

SEQ ID NO: 10794 - RNA, 69 nt, synthetic construct
  source 1..69: mol_type = other RNA
tctgaacctgaagctgctgttacctttgccaagtgttccagccaccggcccagggcaatgaacacaaag

SEQ ID NO: 10795 - RNA, 70 nt, synthetic construct
  source 1..70: mol_type = other RNA
ttctgaacctgaagctgctgttacctttgccaagtgttccagccaccggcccagggcaatgaacacaaag

SEQ ID NO: 10796 - RNA, 71 nt, synthetic construct
  source 1..71: mol_type = other RNA
tttctgaacctgaagctgctgttacctttgccaagtgttccagccaccggcccagggcaatgaacacaaag

SEQ ID NO: 10797 - RNA, 72 nt, synthetic construct
  source 1..72: mol_type = other RNA
ttttctgaacctgaagctgctgttacctttgccaagtgttccagccaccggcccagggcaatgaacacaaag

SEQ ID NO: 10798 - RNA, 73 nt, synthetic construct
  source 1..73: mol_type = other RNA
cttttctgaacctgaagctgctgttacctttgccaagtgttccagccaccggcccagggcaatgaacacaaag

SEQ ID NO: 10799 - RNA, 74 nt, synthetic construct
  source 1..74: mol_type = other RNA
tcttttctgaacctgaagctgctgttacctttgccaagtgttccagccaccggcccagggcaatgaacacaaag

SEQ ID NO: 10800 - RNA, 75 nt, synthetic construct
  source 1..75: mol_type = other RNA
ctcttttctgaacctgaagctgctgttacctttgccaagtgttccagccaccggcccagggcaatgaacacaaag

SEQ ID NO: 10801 - RNA, 76 nt, synthetic construct
  source 1..76: mol_type = other RNA
gctcttttctgaacctgaagctgctgttacctttgccaagtgttccagccaccggcccagggcaatgaacacaaag

SEQ ID NO: 10802 - RNA, 77 nt, synthetic construct
  source 1..77: mol_type = other RNA
agctcttttctgaacctgaagctgctgttacctttgccaagtgttccagccaccggcccagggcaatgaacacaaag

SEQ ID NO: 10803 - RNA, 78 nt, synthetic construct
  source 1..78: mol_type = other RNA
cagctcttttctgaacctgaagctgctgttacctttgccaagtgttccagccaccggcccagggcaatgaacacaaag

SEQ ID NO: 10804 - RNA, 79 nt, synthetic construct
  source 1..79: mol_type = other RNA
gcagctcttttctgaacctgaagctgctgttacctttgccaagtgttccagccaccggcccagggcaatgaacacaaag

SEQ ID NO: 10805 - RNA, 80 nt, synthetic construct
  source 1..80: mol_type = other RNA
agcagctcttttctgaacctgaagctgctgttacctttgccaagtgttccagccaccggcccagggcaatgaacacaaag

SEQ ID NO: 10806 - RNA, 81 nt, synthetic construct
  source 1..81: mol_type = other RNA
gagcagctcttttctgaacctgaagctgctgttacctttgccaagtgttccagccaccggcccagggcaatgaacacaaag

SEQ ID NO: 10807 - RNA, 82 nt, synthetic construct
  source 1..82: mol_type = other RNA
ggagcagctcttttctgaacctgaagctgctgttacctttgccaagtgttccagccaccggcccagggcaatgaacacaaag

SEQ ID NO: 10808 - RNA, 83 nt, synthetic construct
  source 1..83: mol_type = other RNA
aggagcagctcttttctgaacctgaagctgctgttacctttgccaagtgttccagccaccggcccagggcaatgaacacaaag

SEQ ID NO: 10809 - RNA, 84 nt, synthetic construct
  source 1..84: mol_type = other RNA
aaggagcagctcttttctgaacctgaagctgctgttacctttgccaagtgttccagccaccggcccagggcaatgaacacaaag

SEQ ID NO: 10810 - RNA, 85 nt, synthetic construct
  source 1..85: mol_type = other RNA
gaaggagcagctcttttctgaacctgaagctgctgttacctttgccaagtgttccagccaccggcccagggcaatgaacacaaag

SEQ ID NO: 10811 - RNA, 86 nt, synthetic construct
  source 1..86: mol_type = other RNA
tgaaggagcagctcttttctgaacctgaagctgctgttacctttgccaagtgttccagccaccggcccagggcaatgaacacaaag

SEQ ID NO: 10812 - RNA, 87 nt, synthetic construct
  source 1..87: mol_type = other RNA
ctgaaggagcagctcttttctgaacctgaagctgctgttacctttgccaagtgttccagccaccggcccagggcaatgaacacaaag

SEQ ID NO: 10813 - RNA, 88 nt, synthetic construct
  source 1..88: mol_type = other RNA
actgaaggagcagctcttttctgaacctgaagctgctgttacctttgccaagtgttccagccaccggcccagggcaatgaacacaaag

SEQ ID NO: 10814 - RNA, 89 nt, synthetic construct
  source 1..89: mol_type = other RNA
tactgaaggagcagctcttttctgaacctgaagctgctgttacctttgccaagtgttccagccaccggcccagggcaatgaacacaaag

SEQ ID NO: 10815 - RNA, 90 nt, synthetic construct
  source 1..90: mol_type = other RNA
ttactgaaggagcagctcttttctgaacctgaagctgctgttacctttgccaagtgttccagccaccggcccagggcaatgaacacaaag

SEQ ID NO: 10816 - RNA, 91 nt, synthetic construct
  source 1..91: mol_type = other RNA
tttactgaaggagcagctcttttctgaacctgaagctgctgttacctttgccaagtgttccagccaccggcccagggcaatgaacacaaag

SEQ ID NO: 10817 - RNA, 92 nt, synthetic construct
  source 1..92: mol_type = other RNA
gtttactgaaggagcagctcttttctgaacctgaagctgctgttacctttgccaagtgttccagccaccggcccagggcaatgaacacaaag

SEQ ID NO: 10818 - RNA, 93 nt, synthetic construct
  source 1..93: mol_type = other RNA
tgtttactgaaggagcagctcttttctgaacctgaagctgctgttacctttgccaagtgttccagccaccggcccagggcaatgaacacaaag

SEQ ID NO: 10819 - RNA, 94 nt, synthetic construct
  source 1..94: mol_type = other RNA
ttgtttactgaaggagcagctcttttctgaacctgaagctgctgttacctttgccaagtgttccagccaccggcccagggcaatgaacacaaag

SEQ ID NO: 10820 - RNA, 95 nt, synthetic construct
  source 1..95: mol_type = other RNA
tttgtttactgaaggagcagctcttttctgaacctgaagctgctgttacctttgccaagtgttccagccaccggcccagggcaatgaacacaaag

SEQ ID NO: 10821 - RNA, 96 nt, synthetic construct
  source 1..96: mol_type = other RNA
atttgtttactgaaggagcagctcttttctgaacctgaagctgctgttacctttgccaagtgttccagccaccggcccagggcaatgaacacaaag

SEQ ID NO: 10822 - RNA, 97 nt, synthetic construct
  source 1..97: mol_type = other RNA
gatttgtttactgaaggagcagctcttttctgaacctgaagctgctgttacctttgccaagtgttccagccaccggcccagggcaatgaacacaaag

SEQ ID NO: 10823 - RNA, 98 nt, synthetic construct
  source 1..98: mol_type = other RNA
agatttgtttactgaaggagcagctcttttctgaacctgaagctgctgttacctttgccaagtgttccagccaccggcccagggcaatgaacacaaag

SEQ ID NO: 10824 - RNA, 99 nt, synthetic construct
  source 1..99: mol_type = other RNA
gagatttgtttactgaaggagcagctcttttctgaacctgaagctgctgttacctttgccaagtgttccagccaccggcccagggcaatgaacacaaag

SEQ ID NO: 10825 - RNA, 100 nt, synthetic construct
  source 1..100: mol_type = other RNA
tgagatttgtttactgaaggagcagctcttttctgaacctgaagctgctgttacctttgccaagtgttccagccaccggcccagggcaatgaacacaaag

SEQ ID NO: 10826 - RNA, 16 nt, synthetic construct
  source 1..16: mol_type = other RNA
ccccccatgctctttg

SEQ ID NO: 10827 - RNA, 17 nt, synthetic construct
  source 1..17: mol_type = other RNA
gccccccatgctctttg

SEQ ID NO: 10828 - RNA, 18 nt, synthetic construct
  source 1..18: mol_type = other RNA
cgccccccatgctctttg

SEQ ID NO: 10829 - RNA, 19 nt, synthetic construct
  source 1..19: mol_type = other RNA
acgccccccatgctctttg

SEQ ID NO: 10830 - RNA, 20 nt, synthetic construct
  source 1..20: mol_type = other RNA
cacgccccccatgctctttg

SEQ ID NO: 10831 - RNA, 21 nt, synthetic construct
  source 1..21: mol_type = other RNA
acacgccccccatgctctttg

SEQ ID NO: 10832 - RNA, 22 nt, synthetic construct
  source 1..22: mol_type = other RNA
gacacgccccccatgctctttg

SEQ ID NO: 10833-10839 - skipped (7 entries)

SEQ ID NO: 10840 - RNA, 10 nt, synthetic construct
  source 1..10: mol_type = other RNA
agagcatggg

SEQ ID NO: 10841 - RNA, 11 nt, synthetic construct
  source 1..11: mol_type = other RNA
agagcatgggg

SEQ ID NO: 10842 - RNA, 12 nt, synthetic construct
  source 1..12: mol_type = other RNA
agagcatggggg

SEQ ID NO: 10843 - RNA, 13 nt, synthetic construct
  source 1..13: mol_type = other RNA
agagcatgggggg

SEQ ID NO: 10844 - RNA, 14 nt, synthetic construct
  source 1..14: mol_type = other RNA
agagcatggggggc

SEQ ID NO: 10845 - RNA, 15 nt, synthetic construct
  source 1..15: mol_type = other RNA
agagcatggggggcg

SEQ ID NO: 10846 - RNA, 16 nt, synthetic construct
  source 1..16: mol_type = other RNA
agagcatggggggcgt

SEQ ID NO: 10847 - RNA, 17 nt, synthetic construct
  source 1..17: mol_type = other RNA
agagcatggggggcgtg

SEQ ID NO: 10848 - RNA, 18 nt, synthetic construct
  source 1..18: mol_type = other RNA
agagcatggggggcgtgt

SEQ ID NO: 10849 - RNA, 19 nt, synthetic construct
  source 1..19: mol_type = other RNA
agagcatggggggcgtgtc

SEQ ID NO: 10850 - RNA, 22 nt, synthetic construct
  source 1..22: mol_type = other RNA
cggcccagggcaatgaagacaa

SEQ ID NO: 10851 - RNA, 22 nt, synthetic construct
  source 1..22: mol_type = other RNA
cggcccagggcaatgaatacaa

SEQ ID NO: 10852 - RNA, 22 nt, synthetic construct
  source 1..22: mol_type = other RNA
cggcccagggcaatgaacacaa

SEQ ID NO: 10853 - RNA, 22 nt, synthetic construct
  source 1..22: mol_type = other RNA
cggcccagggcaatgaaaacaa

SEQ ID NO: 10854 - RNA, 23 nt, synthetic construct
  source 1..23: mol_type = other RNA
ccggcccagggcaatgaaaacaa

SEQ ID NO: 10855 - RNA, 23 nt, synthetic construct
  source 1..23: mol_type = other RNA
ccggcccagggcaatgaatacaa

SEQ ID NO: 10856 - RNA, 23 nt, synthetic construct
  source 1..23: mol_type = other RNA
ccggcccagggcaatgaacacaa

SEQ ID NO: 10857 - RNA, 23 nt, synthetic construct
  source 1..23: mol_type = other RNA
ccggcccagggcaatgaagacaa

SEQ ID NO: 10858 - RNA, 24 nt, synthetic construct
  source 1..24: mol_type = other RNA
accggcccagggcaatgaatacaa

SEQ ID NO: 10859 - RNA, 24 nt, synthetic construct
  source 1..24: mol_type = other RNA
accggcccagggcaatgaaaacaa

SEQ ID NO: 10860 - RNA, 24 nt, synthetic construct
  source 1..24: mol_type = other RNA
accggcccagggcaatgaacacaa

SEQ ID NO: 10861 - RNA, 24 nt, synthetic construct
  source 1..24: mol_type = other RNA
accggcccagggcaatgaagacaa

SEQ ID NO: 10862 - RNA, 25 nt, synthetic construct
  source 1..25: mol_type = other RNA
caccggcccagggcaatgaatacaa

SEQ ID NO: 10863 - RNA, 25 nt, synthetic construct
  source 1..25: mol_type = other RNA
caccggcccagggcaatgaaaacaa

SEQ ID NO: 10864 - RNA, 25 nt, synthetic construct
  source 1..25: mol_type = other RNA
caccggcccagggcaatgaagacaa

SEQ ID NO: 10865 - RNA, 25 nt, synthetic construct
  source 1..25: mol_type = other RNA
caccggcccagggcaatgaacacaa

SEQ ID NO: 10866 - RNA, 26 nt, synthetic construct
  source 1..26: mol_type = other RNA
ccaccggcccagggcaatgaacacaa

SEQ ID NO: 10867 - RNA, 26 nt, synthetic construct
  source 1..26: mol_type = other RNA
ccaccggcccagggcaatgaatacaa

SEQ ID NO: 10868 - RNA, 26 nt, synthetic construct
  source 1..26: mol_type = other RNA
ccaccggcccagggcaatgaagacaa

SEQ ID NO: 10869 - RNA, 26 nt, synthetic construct
  source 1..26: mol_type = other RNA
ccaccggcccagggcaatgaaaacaa

SEQ ID NO: 10870 - RNA, 27 nt, synthetic construct
  source 1..27: mol_type = other RNA
gccaccggcccagggcaatgaacacaa

SEQ ID NO: 10871 - RNA, 27 nt, synthetic construct
  source 1..27: mol_type = other RNA
gccaccggcccagggcaatgaaaacaa

SEQ ID NO: 10872 - RNA, 27 nt, synthetic construct
  source 1..27: mol_type = other RNA
gccaccggcccagggcaatgaatacaa

SEQ ID NO: 10873 - RNA, 27 nt, synthetic construct
  source 1..27: mol_type = other RNA
gccaccggcccagggcaatgaagacaa

SEQ ID NO: 10874 - RNA, 28 nt, synthetic construct
  source 1..28: mol_type = other RNA
agccaccggcccagggcaatgaagacaa

SEQ ID NO: 10875 - RNA, 28 nt, synthetic construct
  source 1..28: mol_type = other RNA
agccaccggcccagggcaatgaaaacaa

SEQ ID NO: 10876 - RNA, 28 nt, synthetic construct
  source 1..28: mol_type = other RNA
agccaccggcccagggcaatgaatacaa

SEQ ID NO: 10877 - RNA, 28 nt, synthetic construct
  source 1..28: mol_type = other RNA
agccaccggcccagggcaatgaacacaa

SEQ ID NO: 10878 - RNA, 29 nt, synthetic construct
  source 1..29: mol_type = other RNA
cagccaccggcccagggcaatgaaaacaa

SEQ ID NO: 10879 - RNA, 29 nt, synthetic construct
  source 1..29: mol_type = other RNA
cagccaccggcccagggcaatgaatacaa

SEQ ID NO: 10880 - RNA, 29 nt, synthetic construct
  source 1..29: mol_type = other RNA
cagccaccggcccagggcaatgaagacaa

SEQ ID NO: 10881 - RNA, 29 nt, synthetic construct
  source 1..29: mol_type = other RNA
cagccaccggcccagggcaatgaacacaa

SEQ ID NO: 10882 - RNA, 30 nt, synthetic construct
  source 1..30: mol_type = other RNA
ccagccaccggcccagggcaatgaaaacaa

SEQ ID NO: 10883 - RNA, 30 nt, synthetic construct
  source 1..30: mol_type = other RNA
ccagccaccggcccagggcaatgaacacaa

SEQ ID NO: 10884 - RNA, 30 nt, synthetic construct
  source 1..30: mol_type = other RNA
ccagccaccggcccagggcaatgaagacaa

SEQ ID NO: 10885 - RNA, 30 nt, synthetic construct
  source 1..30: mol_type = other RNA
ccagccaccggcccagggcaatgaatacaa

SEQ ID NO: 10886 - RNA, 31 nt, synthetic construct
  source 1..31: mol_type = other RNA
tccagccaccggcccagggcaatgaaaacaa

SEQ ID NO: 10887 - RNA, 31 nt, synthetic construct
  source 1..31: mol_type = other RNA
tccagccaccggcccagggcaatgaagacaa

SEQ ID NO: 10888 - RNA, 31 nt, synthetic construct
  source 1..31: mol_type = other RNA
tccagccaccggcccagggcaatgaacacaa

SEQ ID NO: 10889 - RNA, 31 nt, synthetic construct
  source 1..31: mol_type = other RNA
tccagccaccggcccagggcaatgaatacaa

SEQ ID NO: 10890 - RNA, 32 nt, synthetic construct
  source 1..32: mol_type = other RNA
ttccagccaccggcccagggcaatgaatacaa

SEQ ID NO: 10891 - RNA, 32 nt, synthetic construct
  source 1..32: mol_type = other RNA
ttccagccaccggcccagggcaatgaagacaa

SEQ ID NO: 10892 - RNA, 32 nt, synthetic construct
  source 1..32: mol_type = other RNA
ttccagccaccggcccagggcaatgaacacaa

SEQ ID NO: 10893 - RNA, 32 nt, synthetic construct
  source 1..32: mol_type = other RNA
ttccagccaccggcccagggcaatgaaaacaa

SEQ ID NO: 10894 - RNA, 33 nt, synthetic construct
  source 1..33: mol_type = other RNA
gttccagccaccggcccagggcaatgaacacaa

SEQ ID NO: 10895 - RNA, 33 nt, synthetic construct
  source 1..33: mol_type = other RNA
gttccagccaccggcccagggcaatgaagacaa

SEQ ID NO: 10896 - RNA, 33 nt, synthetic construct
  source 1..33: mol_type = other RNA
gttccagccaccggcccagggcaatgaatacaa

SEQ ID NO: 10897 - RNA, 33 nt, synthetic construct
  source 1..33: mol_type = other RNA
gttccagccaccggcccagggcaatgaaaacaa

SEQ ID NO: 10898 - RNA, 34 nt, synthetic construct
  source 1..34: mol_type = other RNA
tgttccagccaccggcccagggcaatgaacacaa

SEQ ID NO: 10899 - RNA, 34 nt, synthetic construct
  source 1..34: mol_type = other RNA
tgttccagccaccggcccagggcaatgaaaacaa

SEQ ID NO: 10900 - RNA, 34 nt, synthetic construct
  source 1..34: mol_type = other RNA
tgttccagccaccggcccagggcaatgaagacaa

SEQ ID NO: 10901 - RNA, 34 nt, synthetic construct
  source 1..34: mol_type = other RNA
tgttccagccaccggcccagggcaatgaatacaa

SEQ ID NO: 10902 - RNA, 35 nt, synthetic construct
  source 1..35: mol_type = other RNA
gtgttccagccaccggcccagggcaatgaatacaa

SEQ ID NO: 10903 - RNA, 35 nt, synthetic construct
  source 1..35: mol_type = other RNA
gtgttccagccaccggcccagggcaatgaaaacaa

SEQ ID NO: 10904 - RNA, 35 nt, synthetic construct
  source 1..35: mol_type = other RNA
gtgttccagccaccggcccagggcaatgaacacaa

SEQ ID NO: 10905 - RNA, 35 nt, synthetic construct
  source 1..35: mol_type = other RNA
gtgttccagccaccggcccagggcaatgaagacaa

SEQ ID NO: 10906 - RNA, 36 nt, synthetic construct
  source 1..36: mol_type = other RNA
agtgttccagccaccggcccagggcaatgaatacaa

SEQ ID NO: 10907 - RNA, 36 nt, synthetic construct
  source 1..36: mol_type = other RNA
agtgttccagccaccggcccagggcaatgaacacaa

SEQ ID NO: 10908 - RNA, 36 nt, synthetic construct
  source 1..36: mol_type = other RNA
agtgttccagccaccggcccagggcaatgaaaacaa

SEQ ID NO: 10909 - RNA, 36 nt, synthetic construct
  source 1..36: mol_type = other RNA
agtgttccagccaccggcccagggcaatgaagacaa

SEQ ID NO: 10910 - RNA, 37 nt, synthetic construct
  source 1..37: mol_type = other RNA
aagtgttccagccaccggcccagggcaatgaatacaa

SEQ ID NO: 10911 - RNA, 37 nt, synthetic construct
  source 1..37: mol_type = other RNA
aagtgttccagccaccggcccagggcaatgaacacaa

SEQ ID NO: 10912 - RNA, 37 nt, synthetic construct
  source 1..37: mol_type = other RNA
aagtgttccagccaccggcccagggcaatgaagacaa

SEQ ID NO: 10913 - RNA, 37 nt, synthetic construct
  source 1..37: mol_type = other RNA
aagtgttccagccaccggcccagggcaatgaaaacaa

SEQ ID NO: 10914 - RNA, 38 nt, synthetic construct
  source 1..38: mol_type = other RNA
caagtgttccagccaccggcccagggcaatgaaaacaa

SEQ ID NO: 10915 - RNA, 38 nt, synthetic construct
  source 1..38: mol_type = other RNA
caagtgttccagccaccggcccagggcaatgaagacaa

SEQ ID NO: 10916 - RNA, 38 nt, synthetic construct
  source 1..38: mol_type = other RNA
caagtgttccagccaccggcccagggcaatgaacacaa

SEQ ID NO: 10917 - RNA, 38 nt, synthetic construct
  source 1..38: mol_type = other RNA
caagtgttccagccaccggcccagggcaatgaatacaa

SEQ ID NO: 10918 - RNA, 39 nt, synthetic construct
  source 1..39: mol_type = other RNA
ccaagtgttccagccaccggcccagggcaatgaagacaa

SEQ ID NO: 10919 - RNA, 39 nt, synthetic construct
  source 1..39: mol_type = other RNA
ccaagtgttccagccaccggcccagggcaatgaacacaa

SEQ ID NO: 10920 - RNA, 39 nt, synthetic construct
  source 1..39: mol_type = other RNA
ccaagtgttccagccaccggcccagggcaatgaatacaa

SEQ ID NO: 10921 - RNA, 39 nt, synthetic construct
  source 1..39: mol_type = other RNA
ccaagtgttccagccaccggcccagggcaatgaaaacaa

SEQ ID NO: 10922 - RNA, 40 nt, synthetic construct
  source 1..40: mol_type = other RNA
gccaagtgttccagccaccggcccagggcaatgaacacaa

SEQ ID NO: 10923 - RNA, 40 nt, synthetic construct
  source 1..40: mol_type = other RNA
gccaagtgttccagccaccggcccagggcaatgaaaacaa

SEQ ID NO: 10924 - RNA, 40 nt, synthetic construct
  source 1..40: mol_type = other RNA
gccaagtgttccagccaccggcccagggcaatgaagacaa

SEQ ID NO: 10925 - RNA, 40 nt, synthetic construct
  source 1..40: mol_type = other RNA
gccaagtgttccagccaccggcccagggcaatgaatacaa

SEQ ID NO: 10926 - RNA, 41 nt, synthetic construct
  source 1..41: mol_type = other RNA
tgccaagtgttccagccaccggcccagggcaatgaagacaa

SEQ ID NO: 10927 - RNA, 41 nt, synthetic construct
  source 1..41: mol_type = other RNA
tgccaagtgttccagccaccggcccagggcaatgaacacaa

SEQ ID NO: 10928 - RNA, 41 nt, synthetic construct
  source 1..41: mol_type = other RNA
tgccaagtgttccagccaccggcccagggcaatgaaaacaa

SEQ ID NO: 10929 - RNA, 41 nt, synthetic construct
  source 1..41: mol_type = other RNA
tgccaagtgttccagccaccggcccagggcaatgaatacaa

SEQ ID NO: 10930 - RNA, 42 nt, synthetic construct
  source 1..42: mol_type = other RNA
ttgccaagtgttccagccaccggcccagggcaatgaatacaa

SEQ ID NO: 10931 - RNA, 42 nt, synthetic construct
  source 1..42: mol_type = other RNA
ttgccaagtgttccagccaccggcccagggcaatgaagacaa

SEQ ID NO: 10932 - RNA, 42 nt, synthetic construct
  source 1..42: mol_type = other RNA
ttgccaagtgttccagccaccggcccagggcaatgaaaacaa

SEQ ID NO: 10933 - RNA, 42 nt, synthetic construct
  source 1..42: mol_type = other RNA
ttgccaagtgttccagccaccggcccagggcaatgaacacaa

SEQ ID NO: 10934 - RNA, 43 nt, synthetic construct
  source 1..43: mol_type = other RNA
tttgccaagtgttccagccaccggcccagggcaatgaagacaa

SEQ ID NO: 10935 - RNA, 43 nt, synthetic construct
  source 1..43: mol_type = other RNA
tttgccaagtgttccagccaccggcccagggcaatgaatacaa

SEQ ID NO: 10936 - RNA, 43 nt, synthetic construct
  source 1..43: mol_type = other RNA
tttgccaagtgttccagccaccggcccagggcaatgaaaacaa

SEQ ID NO: 10937 - RNA, 43 nt, synthetic construct
  source 1..43: mol_type = other RNA
tttgccaagtgttccagccaccggcccagggcaatgaacacaa

SEQ ID NO: 10938 - RNA, 44 nt, synthetic construct
  source 1..44: mol_type = other RNA
ctttgccaagtgttccagccaccggcccagggcaatgaacacaa

SEQ ID NO: 10939 - RNA, 44 nt, synthetic construct
  source 1..44: mol_type = other RNA
ctttgccaagtgttccagccaccggcccagggcaatgaaaacaa

SEQ ID NO: 10940 - RNA, 44 nt, synthetic construct
  source 1..44: mol_type = other RNA
ctttgccaagtgttccagccaccggcccagggcaatgaagacaa

SEQ ID NO: 10941 - RNA, 44 nt, synthetic construct
  source 1..44: mol_type = other RNA
ctttgccaagtgttccagccaccggcccagggcaatgaatacaa

SEQ ID NO: 10942 - RNA, 45 nt, synthetic construct
  source 1..45: mol_type = other RNA
cctttgccaagtgttccagccaccggcccagggcaatgaagacaa

SEQ ID NO: 10943 - RNA, 45 nt, synthetic construct
  source 1..45: mol_type = other RNA
cctttgccaagtgttccagccaccggcccagggcaatgaacacaa

SEQ ID NO: 10944 - RNA, 45 nt, synthetic construct
  source 1..45: mol_type = other RNA
cctttgccaagtgttccagccaccggcccagggcaatgaaaacaa

SEQ ID NO: 10945 - RNA, 45 nt, synthetic construct
  source 1..45: mol_type = other RNA
cctttgccaagtgttccagccaccggcccagggcaatgaatacaa

SEQ ID NO: 10946 - RNA, 46 nt, synthetic construct
  source 1..46: mol_type = other RNA
acctttgccaagtgttccagccaccggcccagggcaatgaaaacaa

SEQ ID NO: 10947 - RNA, 46 nt, synthetic construct
  source 1..46: mol_type = other RNA
acctttgccaagtgttccagccaccggcccagggcaatgaatacaa

SEQ ID NO: 10948 - RNA, 46 nt, synthetic construct
  source 1..46: mol_type = other RNA
acctttgccaagtgttccagccaccggcccagggcaatgaagacaa

SEQ ID NO: 10949 - RNA, 46 nt, synthetic construct
  source 1..46: mol_type = other RNA
acctttgccaagtgttccagccaccggcccagggcaatgaacacaa

SEQ ID NO: 10950 - RNA, 47 nt, synthetic construct
  source 1..47: mol_type = other RNA
tacctttgccaagtgttccagccaccggcccagggcaatgaacacaa

SEQ ID NO: 10951 - RNA, 47 nt, synthetic construct
  source 1..47: mol_type = other RNA
tacctttgccaagtgttccagccaccggcccagggcaatgaaaacaa

SEQ ID NO: 10952 - RNA, 47 nt, synthetic construct
  source 1..47: mol_type = other RNA
tacctttgccaagtgttccagccaccggcccagggcaatgaatacaa

SEQ ID NO: 10953 - RNA, 47 nt, synthetic construct
  source 1..47: mol_type = other RNA
tacctttgccaagtgttccagccaccggcccagggcaatgaagacaa

SEQ ID NO: 10954 - RNA, 48 nt, synthetic construct
  source 1..48: mol_type = other RNA
ttacctttgccaagtgttccagccaccggcccagggcaatgaaaacaa

SEQ ID NO: 10955 - RNA, 48 nt, synthetic construct
  source 1..48: mol_type = other RNA
ttacctttgccaagtgttccagccaccggcccagggcaatgaacacaa

SEQ ID NO: 10956 - RNA, 48 nt, synthetic construct
  source 1..48: mol_type = other RNA
ttacctttgccaagtgttccagccaccggcccagggcaatgaatacaa

SEQ ID NO: 10957 - RNA, 48 nt, synthetic construct
  source 1..48: mol_type = other RNA
ttacctttgccaagtgttccagccaccggcccagggcaatgaagacaa

SEQ ID NO: 10958 - RNA, 49 nt, synthetic construct
  source 1..49: mol_type = other RNA
gttacctttgccaagtgttccagccaccggcccagggcaatgaacacaa

SEQ ID NO: 10959 - RNA, 49 nt, synthetic construct
  source 1..49: mol_type = other RNA
gttacctttgccaagtgttccagccaccggcccagggcaatgaagacaa

SEQ ID NO: 10960 - RNA, 49 nt, synthetic construct
  source 1..49: mol_type = other RNA
gttacctttgccaagtgttccagccaccggcccagggcaatgaaaacaa

SEQ ID NO: 10961 - RNA, 49 nt, synthetic construct
  source 1..49: mol_type = other RNA
gttacctttgccaagtgttccagccaccggcccagggcaatgaatacaa

SEQ ID NO: 10962 - RNA, 50 nt, synthetic construct
  source 1..50: mol_type = other RNA
tgttacctttgccaagtgttccagccaccggcccagggcaatgaagacaa

SEQ ID NO: 10963 - RNA, 50 nt, synthetic construct
  source 1..50: mol_type = other RNA
tgttacctttgccaagtgttccagccaccggcccagggcaatgaatacaa

SEQ ID NO: 10964 - RNA, 50 nt, synthetic construct
  source 1..50: mol_type = other RNA
tgttacctttgccaagtgttccagccaccggcccagggcaatgaacacaa

SEQ ID NO: 10965 - RNA, 50 nt, synthetic construct
  source 1..50: mol_type = other RNA
tgttacctttgccaagtgttccagccaccggcccagggcaatgaaaacaa

SEQ ID NO: 10966 - RNA, 51 nt, synthetic construct
  source 1..51: mol_type = other RNA
ctgttacctttgccaagtgttccagccaccggcccagggcaatgaatacaa

SEQ ID NO: 10967 - RNA, 51 nt, synthetic construct
  source 1..51: mol_type = other RNA
ctgttacctttgccaagtgttccagccaccggcccagggcaatgaacacaa

SEQ ID NO: 10968 - RNA, 51 nt, synthetic construct
  source 1..51: mol_type = other RNA
ctgttacctttgccaagtgttccagccaccggcccagggcaatgaagacaa

SEQ ID NO: 10969 - RNA, 51 nt, synthetic construct
  source 1..51: mol_type = other RNA
ctgttacctttgccaagtgttccagccaccggcccagggcaatgaaaacaa

SEQ ID NO: 10970 - RNA, 52 nt, synthetic construct
  source 1..52: mol_type = other RNA
gctgttacctttgccaagtgttccagccaccggcccagggcaatgaagacaa

SEQ ID NO: 10971 - RNA, 52 nt, synthetic construct
  source 1..52: mol_type = other RNA
gctgttacctttgccaagtgttccagccaccggcccagggcaatgaatacaa

SEQ ID NO: 10972 - RNA, 52 nt, synthetic construct
  source 1..52: mol_type = other RNA
gctgttacctttgccaagtgttccagccaccggcccagggcaatgaaaacaa

SEQ ID NO: 10973 - RNA, 52 nt, synthetic construct
  source 1..52: mol_type = other RNA
gctgttacctttgccaagtgttccagccaccggcccagggcaatgaacacaa

SEQ ID NO: 10974 - RNA, 53 nt, synthetic construct
  source 1..53: mol_type = other RNA
tgctgttacctttgccaagtgttccagccaccggcccagggcaatgaaaacaa

SEQ ID NO: 10975 - RNA, 53 nt, synthetic construct
  source 1..53: mol_type = other RNA
tgctgttacctttgccaagtgttccagccaccggcccagggcaatgaacacaa

SEQ ID NO: 10976 - RNA, 53 nt, synthetic construct
  source 1..53: mol_type = other RNA
tgctgttacctttgccaagtgttccagccaccggcccagggcaatgaagacaa

SEQ ID NO: 10977 - RNA, 53 nt, synthetic construct
  source 1..53: mol_type = other RNA
tgctgttacctttgccaagtgttccagccaccggcccagggcaatgaatacaa

SEQ ID NO: 10978 - RNA, 54 nt, synthetic construct
  source 1..54: mol_type = other RNA
ctgctgttacctttgccaagtgttccagccaccggcccagggcaatgaagacaa

SEQ ID NO: 10979 - RNA, 54 nt, synthetic construct
  source 1..54: mol_type = other RNA
ctgctgttacctttgccaagtgttccagccaccggcccagggcaatgaatacaa

SEQ ID NO: 10980 - RNA, 54 nt, synthetic construct
  source 1..54: mol_type = other RNA
ctgctgttacctttgccaagtgttccagccaccggcccagggcaatgaaaacaa

SEQ ID NO: 10981 - RNA, 54 nt, synthetic construct
  source 1..54: mol_type = other RNA
ctgctgttacctttgccaagtgttccagccaccggcccagggcaatgaacacaa

SEQ ID NO: 10982 - RNA, 55 nt, synthetic construct
  source 1..55: mol_type = other RNA
gctgctgttacctttgccaagtgttccagccaccggcccagggcaatgaatacaa

SEQ ID NO: 10983 - RNA, 55 nt, synthetic construct
  source 1..55: mol_type = other RNA
gctgctgttacctttgccaagtgttccagccaccggcccagggcaatgaaaacaa

SEQ ID NO: 10984 - RNA, 55 nt, synthetic construct
  source 1..55: mol_type = other RNA
gctgctgttacctttgccaagtgttccagccaccggcccagggcaatgaacacaa

SEQ ID NO: 10985 - RNA, 55 nt, synthetic construct
  source 1..55: mol_type = other RNA
gctgctgttacctttgccaagtgttccagccaccggcccagggcaatgaagacaa

SEQ ID NO: 10986 - RNA, 56 nt, synthetic construct
  source 1..56: mol_type = other RNA
agctgctgttacctttgccaagtgttccagccaccggcccagggcaatgaaaacaa

SEQ ID NO: 10987 - RNA, 56 nt, synthetic construct
  source 1..56: mol_type = other RNA
agctgctgttacctttgccaagtgttccagccaccggcccagggcaatgaacacaa

SEQ ID NO: 10988 - RNA, 56 nt, synthetic construct
  source 1..56: mol_type = other RNA
agctgctgttacctttgccaagtgttccagccaccggcccagggcaatgaatacaa

SEQ ID NO: 10989 - RNA, 56 nt, synthetic construct
  source 1..56: mol_type = other RNA
agctgctgttacctttgccaagtgttccagccaccggcccagggcaatgaagacaa

SEQ ID NO: 10990 - RNA, 57 nt, synthetic construct
  source 1..57: mol_type = other RNA
aagctgctgttacctttgccaagtgttccagccaccggcccagggcaatgaagacaa

SEQ ID NO: 10991 - RNA, 57 nt, synthetic construct
  source 1..57: mol_type = other RNA
aagctgctgttacctttgccaagtgttccagccaccggcccagggcaatgaaaacaa

SEQ ID NO: 10992 - RNA, 57 nt, synthetic construct
  source 1..57: mol_type = other RNA
aagctgctgttacctttgccaagtgttccagccaccggcccagggcaatgaacacaa

SEQ ID NO: 10993 - RNA, 57 nt, synthetic construct
  source 1..57: mol_type = other RNA
aagctgctgttacctttgccaagtgttccagccaccggcccagggcaatgaatacaa

SEQ ID NO: 10994 - RNA, 58 nt, synthetic construct
  source 1..58: mol_type = other RNA
gaagctgctgttacctttgccaagtgttccagccaccggcccagggcaatgaatacaa

SEQ ID NO: 10995 - RNA, 58 nt, synthetic construct
  source 1..58: mol_type = other RNA
gaagctgctgttacctttgccaagtgttccagccaccggcccagggcaatgaacacaa

SEQ ID NO: 10996 - RNA, 58 nt, synthetic construct
  source 1..58: mol_type = other RNA
gaagctgctgttacctttgccaagtgttccagccaccggcccagggcaatgaaaacaa

SEQ ID NO: 10997 - RNA, 58 nt, synthetic construct
  source 1..58: mol_type = other RNA
gaagctgctgttacctttgccaagtgttccagccaccggcccagggcaatgaagacaa

SEQ ID NO: 10998 - RNA, 59 nt, synthetic construct
  source 1..59: mol_type = other RNA
tgaagctgctgttacctttgccaagtgttccagccaccggcccagggcaatgaacacaa

SEQ ID NO: 10999 - RNA, 59 nt, synthetic construct
  source 1..59: mol_type = other RNA
tgaagctgctgttacctttgccaagtgttccagccaccggcccagggcaatgaatacaa

SEQ ID NO: 11000 - RNA, 59 nt, synthetic construct
  source 1..59: mol_type = other RNA
tgaagctgctgttacctttgccaagtgttccagccaccggcccagggcaatgaaaacaa

SEQ ID NO: 11001 - RNA, 59 nt, synthetic construct
  source 1..59: mol_type = other RNA
tgaagctgctgttacctttgccaagtgttccagccaccggcccagggcaatgaagacaa

SEQ ID NO: 11002 - RNA, 60 nt, synthetic construct
  source 1..60: mol_type = other RNA
ctgaagctgctgttacctttgccaagtgttccagccaccggcccagggcaatgaagacaa

SEQ ID NO: 11003 - RNA, 60 nt, synthetic construct
  source 1..60: mol_type = other RNA
ctgaagctgctgttacctttgccaagtgttccagccaccggcccagggcaatgaacacaa

SEQ ID NO: 11004 - RNA, 60 nt, synthetic construct
  source 1..60: mol_type = other RNA
ctgaagctgctgttacctttgccaagtgttccagccaccggcccagggcaatgaatacaa

SEQ ID NO: 11005 - RNA, 60 nt, synthetic construct
  source 1..60: mol_type = other RNA
ctgaagctgctgttacctttgccaagtgttccagccaccggcccagggcaatgaaaacaa

SEQ ID NO: 11006 - RNA, 61 nt, synthetic construct
  source 1..61: mol_type = other RNA
cctgaagctgctgttacctttgccaagtgttccagccaccggcccagggcaatgaaaacaa

SEQ ID NO: 11007 - RNA, 61 nt, synthetic construct
  source 1..61: mol_type = other RNA
cctgaagctgctgttacctttgccaagtgttccagccaccggcccagggcaatgaacacaa

SEQ ID NO: 11008 - RNA, 61 nt, synthetic construct
  source 1..61: mol_type = other RNA
cctgaagctgctgttacctttgccaagtgttccagccaccggcccagggcaatgaatacaa

SEQ ID NO: 11009 - RNA, 61 nt, synthetic construct
  source 1..61: mol_type = other RNA
cctgaagctgctgttacctttgccaagtgttccagccaccggcccagggcaatgaagacaa

SEQ ID NO: 11010 - RNA, 62 nt, synthetic construct
  source 1..62: mol_type = other RNA
acctgaagctgctgttacctttgccaagtgttccagccaccggcccagggcaatgaatacaa

SEQ ID NO: 11011 - RNA, 62 nt, synthetic construct
  source 1..62: mol_type = other RNA
acctgaagctgctgttacctttgccaagtgttccagccaccggcccagggcaatgaaaacaa

SEQ ID NO: 11012 - RNA, 62 nt, synthetic construct
  source 1..62: mol_type = other RNA
acctgaagctgctgttacctttgccaagtgttccagccaccggcccagggcaatgaagacaa

SEQ ID NO: 11013 - RNA, 62 nt, synthetic construct
  source 1..62: mol_type = other RNA
acctgaagctgctgttacctttgccaagtgttccagccaccggcccagggcaatgaacacaa

SEQ ID NO: 11014 - RNA, 63 nt, synthetic construct
  source 1..63: mol_type = other RNA
aacctgaagctgctgttacctttgccaagtgttccagccaccggcccagggcaatgaatacaa

SEQ ID NO: 11015 - RNA, 63 nt, synthetic construct
  source 1..63: mol_type = other RNA
aacctgaagctgctgttacctttgccaagtgttccagccaccggcccagggcaatgaagacaa

SEQ ID NO: 11016 - RNA, 63 nt, synthetic construct
  source 1..63: mol_type = other RNA
aacctgaagctgctgttacctttgccaagtgttccagccaccggcccagggcaatgaaaacaa

SEQ ID NO: 11017 - RNA, 63 nt, synthetic construct
  source 1..63: mol_type = other RNA
aacctgaagctgctgttacctttgccaagtgttccagccaccggcccagggcaatgaacacaa

SEQ ID NO: 11018 - RNA, 64 nt, synthetic construct
  source 1..64: mol_type = other RNA
gaacctgaagctgctgttacctttgccaagtgttccagccaccggcccagggcaatgaagacaa

SEQ ID NO: 11019 - RNA, 64 nt, synthetic construct
  source 1..64: mol_type = other RNA
gaacctgaagctgctgttacctttgccaagtgttccagccaccggcccagggcaatgaacacaa

SEQ ID NO: 11020 - RNA, 64 nt, synthetic construct
  source 1..64: mol_type = other RNA
gaacctgaagctgctgttacctttgccaagtgttccagccaccggcccagggcaatgaatacaa

SEQ ID NO: 11021 - RNA, 64 nt, synthetic construct
  source 1..64: mol_type = other RNA
gaacctgaagctgctgttacctttgccaagtgttccagccaccggcccagggcaatgaaaacaa

SEQ ID NO: 11022 - RNA, 65 nt, synthetic construct
  source 1..65: mol_type = other RNA
tgaacctgaagctgctgttacctttgccaagtgttccagccaccggcccagggcaatgaatacaa

SEQ ID NO: 11023 - RNA, 65 nt, synthetic construct
  source 1..65: mol_type = other RNA
tgaacctgaagctgctgttacctttgccaagtgttccagccaccggcccagggcaatgaagacaa

SEQ ID NO: 11024 - RNA, 65 nt, synthetic construct
  source 1..65: mol_type = other RNA
tgaacctgaagctgctgttacctttgccaagtgttccagccaccggcccagggcaatgaaaacaa

SEQ ID NO: 11025 - RNA, 65 nt, synthetic construct
  source 1..65: mol_type = other RNA
tgaacctgaagctgctgttacctttgccaagtgttccagccaccggcccagggcaatgaacacaa

SEQ ID NO: 11026 - RNA, 66 nt, synthetic construct
  source 1..66: mol_type = other RNA
ctgaacctgaagctgctgttacctttgccaagtgttccagccaccggcccagggcaatgaatacaa

SEQ ID NO: 11027 - RNA, 66 nt, synthetic construct
  source 1..66: mol_type = other RNA
ctgaacctgaagctgctgttacctttgccaagtgttccagccaccggcccagggcaatgaagacaa

SEQ ID NO: 11028 - RNA, 66 nt, synthetic construct
  source 1..66: mol_type = other RNA
ctgaacctgaagctgctgttacctttgccaagtgttccagccaccggcccagggcaatgaacacaa

SEQ ID NO: 11029 - RNA, 66 nt, synthetic construct
  source 1..66: mol_type = other RNA
ctgaacctgaagctgctgttacctttgccaagtgttccagccaccggcccagggcaatgaaaacaa

SEQ ID NO: 11030 - RNA, 67 nt, synthetic construct
  source 1..67: mol_type = other RNA
tctgaacctgaagctgctgttacctttgccaagtgttccagccaccggcccagggcaatgaatacaa

SEQ ID NO: 11031 - RNA, 67 nt, synthetic construct
  source 1..67: mol_type = other RNA
tctgaacctgaagctgctgttacctttgccaagtgttccagccaccggcccagggcaatgaagacaa

SEQ ID NO: 11032 - RNA, 67 nt, synthetic construct
  source 1..67: mol_type = other RNA
tctgaacctgaagctgctgttacctttgccaagtgttccagccaccggcccagggcaatgaaaacaa

SEQ ID NO: 11033 - RNA, 67 nt, synthetic construct
  source 1..67: mol_type = other RNA
tctgaacctgaagctgctgttacctttgccaagtgttccagccaccggcccagggcaatgaacacaa

SEQ ID NO: 11034 - RNA, 68 nt, synthetic construct
  source 1..68: mol_type = other RNA
ttctgaacctgaagctgctgttacctttgccaagtgttccagccaccggcccagggcaatgaaaacaa

SEQ ID NO: 11035 - RNA, 68 nt, synthetic construct
  source 1..68: mol_type = other RNA
ttctgaacctgaagctgctgttacctttgccaagtgttccagccaccggcccagggcaatgaacacaa

SEQ ID NO: 11036 - RNA, 68 nt, synthetic construct
  source 1..68: mol_type = other RNA
ttctgaacctgaagctgctgttacctttgccaagtgttccagccaccggcccagggcaatgaagacaa

SEQ ID NO: 11037 - RNA, 68 nt, synthetic construct
  source 1..68: mol_type = other RNA
ttctgaacctgaagctgctgttacctttgccaagtgttccagccaccggcccagggcaatgaatacaa

SEQ ID NO: 11038 - RNA, 69 nt, synthetic construct
  source 1..69: mol_type = other RNA
tttctgaacctgaagctgctgttacctttgccaagtgttccagccaccggcccagggcaatgaacacaa

SEQ ID NO: 11039 - RNA, 69 nt, synthetic construct
  source 1..69: mol_type = other RNA
tttctgaacctgaagctgctgttacctttgccaagtgttccagccaccggcccagggcaatgaaaacaa

SEQ ID NO: 11040 - RNA, 69 nt, synthetic construct
  source 1..69: mol_type = other RNA
tttctgaacctgaagctgctgttacctttgccaagtgttccagccaccggcccagggcaatgaagacaa

SEQ ID NO: 11041 - RNA, 69 nt, synthetic construct
  source 1..69: mol_type = other RNA
tttctgaacctgaagctgctgttacctttgccaagtgttccagccaccggcccagggcaatgaatacaa

SEQ ID NO: 11042 - RNA, 70 nt, synthetic construct
  source 1..70: mol_type = other RNA
ttttctgaacctgaagctgctgttacctttgccaagtgttccagccaccggcccagggcaatgaaaacaa

SEQ ID NO: 11043 - RNA, 70 nt, synthetic construct
  source 1..70: mol_type = other RNA
ttttctgaacctgaagctgctgttacctttgccaagtgttccagccaccggcccagggcaatgaagacaa

SEQ ID NO: 11044 - RNA, 70 nt, synthetic construct
  source 1..70: mol_type = other RNA
ttttctgaacctgaagctgctgttacctttgccaagtgttccagccaccggcccagggcaatgaacacaa

SEQ ID NO: 11045 - RNA, 70 nt, synthetic construct
  source 1..70: mol_type = other RNA
ttttctgaacctgaagctgctgttacctttgccaagtgttccagccaccggcccagggcaatgaatacaa

SEQ ID NO: 11046 - RNA, 71 nt, synthetic construct
  source 1..71: mol_type = other RNA
cttttctgaacctgaagctgctgttacctttgccaagtgttccagccaccggcccagggcaatgaacacaa

SEQ ID NO: 11047 - RNA, 71 nt, synthetic construct
  source 1..71: mol_type = other RNA
cttttctgaacctgaagctgctgttacctttgccaagtgttccagccaccggcccagggcaatgaaaacaa

SEQ ID NO: 11048 - RNA, 71 nt, synthetic construct
  source 1..71: mol_type = other RNA
cttttctgaacctgaagctgctgttacctttgccaagtgttccagccaccggcccagggcaatgaagacaa

SEQ ID NO: 11049 - RNA, 71 nt, synthetic construct
  source 1..71: mol_type = other RNA
cttttctgaacctgaagctgctgttacctttgccaagtgttccagccaccggcccagggcaatgaatacaa

SEQ ID NO: 11050 - RNA, 72 nt, synthetic construct
  source 1..72: mol_type = other RNA
tcttttctgaacctgaagctgctgttacctttgccaagtgttccagccaccggcccagggcaatgaagacaa

SEQ ID NO: 11051 - RNA, 72 nt, synthetic construct
  source 1..72: mol_type = other RNA
tcttttctgaacctgaagctgctgttacctttgccaagtgttccagccaccggcccagggcaatgaaaacaa

SEQ ID NO: 11052 - RNA, 72 nt, synthetic construct
  source 1..72: mol_type = other RNA
tcttttctgaacctgaagctgctgttacctttgccaagtgttccagccaccggcccagggcaatgaatacaa

SEQ ID NO: 11053 - RNA, 72 nt, synthetic construct
  source 1..72: mol_type = other RNA
tcttttctgaacctgaagctgctgttacctttgccaagtgttccagccaccggcccagggcaatgaacacaa

SEQ ID NO: 11054 - RNA, 73 nt, synthetic construct
  source 1..73: mol_type = other RNA
ctcttttctgaacctgaagctgctgttacctttgccaagtgttccagccaccggcccagggcaatgaaaacaa

SEQ ID NO: 11055 - RNA, 73 nt, synthetic construct
  source 1..73: mol_type = other RNA
ctcttttctgaacctgaagctgctgttacctttgccaagtgttccagccaccggcccagggcaatgaagacaa

SEQ ID NO: 11056 - RNA, 73 nt, synthetic construct
  source 1..73: mol_type = other RNA
ctcttttctgaacctgaagctgctgttacctttgccaagtgttccagccaccggcccagggcaatgaacacaa

SEQ ID NO: 11057 - RNA, 73 nt, synthetic construct
  source 1..73: mol_type = other RNA
ctcttttctgaacctgaagctgctgttacctttgccaagtgttccagccaccggcccagggcaatgaatacaa

SEQ ID NO: 11058 - RNA, 74 nt, synthetic construct
  source 1..74: mol_type = other RNA
gctcttttctgaacctgaagctgctgttacctttgccaagtgttccagccaccggcccagggcaatgaaaacaa

SEQ ID NO: 11059 - RNA, 74 nt, synthetic construct
  source 1..74: mol_type = other RNA
gctcttttctgaacctgaagctgctgttacctttgccaagtgttccagccaccggcccagggcaatgaagacaa

SEQ ID NO: 11060 - RNA, 74 nt, synthetic construct
  source 1..74: mol_type = other RNA
gctcttttctgaacctgaagctgctgttacctttgccaagtgttccagccaccggcccagggcaatgaacacaa

SEQ ID NO: 11061 - RNA, 74 nt, synthetic construct
  source 1..74: mol_type = other RNA
gctcttttctgaacctgaagctgctgttacctttgccaagtgttccagccaccggcccagggcaatgaatacaa

SEQ ID NO: 11062 - RNA, 75 nt, synthetic construct
  source 1..75: mol_type = other RNA
agctcttttctgaacctgaagctgctgttacctttgccaagtgttccagccaccggcccagggcaatgaagacaa

SEQ ID NO: 11063 - RNA, 75 nt, synthetic construct
  source 1..75: mol_type = other RNA
agctcttttctgaacctgaagctgctgttacctttgccaagtgttccagccaccggcccagggcaatgaacacaa

SEQ ID NO: 11064 - RNA, 75 nt, synthetic construct
  source 1..75: mol_type = other RNA
agctcttttctgaacctgaagctgctgttacctttgccaagtgttccagccaccggcccagggcaatgaaaacaa

SEQ ID NO: 11065 - RNA, 75 nt, synthetic construct
  source 1..75: mol_type = other RNA
agctcttttctgaacctgaagctgctgttacctttgccaagtgttccagccaccggcccagggcaatgaatacaa

SEQ ID NO: 11066 - RNA, 76 nt, synthetic construct
  source 1..76: mol_type = other RNA
cagctcttttctgaacctgaagctgctgttacctttgccaagtgttccagccaccggcccagggcaatgaacacaa

SEQ ID NO: 11067 - RNA, 76 nt, synthetic construct
  source 1..76: mol_type = other RNA
cagctcttttctgaacctgaagctgctgttacctttgccaagtgttccagccaccggcccagggcaatgaatacaa

SEQ ID NO: 11068 - RNA, 76 nt, synthetic construct
  source 1..76: mol_type = other RNA
cagctcttttctgaacctgaagctgctgttacctttgccaagtgttccagccaccggcccagggcaatgaaaacaa

SEQ ID NO: 11069 - RNA, 76 nt, synthetic construct
  source 1..76: mol_type = other RNA
cagctcttttctgaacctgaagctgctgttacctttgccaagtgttccagccaccggcccagggcaatgaagacaa

SEQ ID NO: 11070 - RNA, 77 nt, synthetic construct
  source 1..77: mol_type = other RNA
gcagctcttttctgaacctgaagctgctgttacctttgccaagtgttccagccaccggcccagggcaatgaatacaa

SEQ ID NO: 11071 - RNA, 77 nt, synthetic construct
  source 1..77: mol_type = other RNA
gcagctcttttctgaacctgaagctgctgttacctttgccaagtgttccagccaccggcccagggcaatgaaaacaa

SEQ ID NO: 11072 - RNA, 77 nt, synthetic construct
  source 1..77: mol_type = other RNA
gcagctcttttctgaacctgaagctgctgttacctttgccaagtgttccagccaccggcccagggcaatgaacacaa

SEQ ID NO: 11073 - RNA, 77 nt, synthetic construct
  source 1..77: mol_type = other RNA
gcagctcttttctgaacctgaagctgctgttacctttgccaagtgttccagccaccggcccagggcaatgaagacaa

SEQ ID NO: 11074 - RNA, 78 nt, synthetic construct
  source 1..78: mol_type = other RNA
agcagctcttttctgaacctgaagctgctgttacctttgccaagtgttccagccaccggcccagggcaatgaacacaa

SEQ ID NO: 11075 - RNA, 78 nt, synthetic construct
  source 1..78: mol_type = other RNA
agcagctcttttctgaacctgaagctgctgttacctttgccaagtgttccagccaccggcccagggcaatgaaaacaa

SEQ ID NO: 11076 - RNA, 78 nt, synthetic construct
  source 1..78: mol_type = other RNA
agcagctcttttctgaacctgaagctgctgttacctttgccaagtgttccagccaccggcccagggcaatgaatacaa

SEQ ID NO: 11077 - RNA, 78 nt, synthetic construct
  source 1..78: mol_type = other RNA
agcagctcttttctgaacctgaagctgctgttacctttgccaagtgttccagccaccggcccagggcaatgaagacaa

SEQ ID NO: 11078 - RNA, 79 nt, synthetic construct
  source 1..79: mol_type = other RNA
gagcagctcttttctgaacctgaagctgctgttacctttgccaagtgttccagccaccggcccagggcaatgaatacaa

SEQ ID NO: 11079 - RNA, 79 nt, synthetic construct
  source 1..79: mol_type = other RNA
gagcagctcttttctgaacctgaagctgctgttacctttgccaagtgttccagccaccggcccagggcaatgaagacaa

SEQ ID NO: 11080 - RNA, 79 nt, synthetic construct
  source 1..79: mol_type = other RNA
gagcagctcttttctgaacctgaagctgctgttacctttgccaagtgttccagccaccggcccagggcaatgaaaacaa

SEQ ID NO: 11081 - RNA, 79 nt, synthetic construct
  source 1..79: mol_type = other RNA
gagcagctcttttctgaacctgaagctgctgttacctttgccaagtgttccagccaccggcccagggcaatgaacacaa

SEQ ID NO: 11082 - RNA, 80 nt, synthetic construct
  source 1..80: mol_type = other RNA
ggagcagctcttttctgaacctgaagctgctgttacctttgccaagtgttccagccaccggcccagggcaatgaacacaa

SEQ ID NO: 11083 - RNA, 80 nt, synthetic construct
  source 1..80: mol_type = other RNA
ggagcagctcttttctgaacctgaagctgctgttacctttgccaagtgttccagccaccggcccagggcaatgaaaacaa

SEQ ID NO: 11084 - RNA, 80 nt, synthetic construct
  source 1..80: mol_type = other RNA
ggagcagctcttttctgaacctgaagctgctgttacctttgccaagtgttccagccaccggcccagggcaatgaagacaa

SEQ ID NO: 11085 - RNA, 80 nt, synthetic construct
  source 1..80: mol_type = other RNA
ggagcagctcttttctgaacctgaagctgctgttacctttgccaagtgttccagccaccggcccagggcaatgaatacaa

SEQ ID NO: 11086 - RNA, 81 nt, synthetic construct
  source 1..81: mol_type = other RNA
aggagcagctcttttctgaacctgaagctgctgttacctttgccaagtgttccagccaccggcccagggcaatgaaaacaa

SEQ ID NO: 11087 - RNA, 81 nt, synthetic construct
  source 1..81: mol_type = other RNA
aggagcagctcttttctgaacctgaagctgctgttacctttgccaagtgttccagccaccggcccagggcaatgaagacaa

SEQ ID NO: 11088 - RNA, 81 nt, synthetic construct
  source 1..81: mol_type = other RNA
aggagcagctcttttctgaacctgaagctgctgttacctttgccaagtgttccagccaccggcccagggcaatgaacacaa

SEQ ID NO: 11089 - RNA, 81 nt, synthetic construct
  source 1..81: mol_type = other RNA
aggagcagctcttttctgaacctgaagctgctgttacctttgccaagtgttccagccaccggcccagggcaatgaatacaa

SEQ ID NO: 11090 - RNA, 82 nt, synthetic construct
  source 1..82: mol_type = other RNA
aaggagcagctcttttctgaacctgaagctgctgttacctttgccaagtgttccagccaccggcccagggcaatgaacacaa

SEQ ID NO: 11091 - RNA, 82 nt, synthetic construct
  source 1..82: mol_type = other RNA
aaggagcagctcttttctgaacctgaagctgctgttacctttgccaagtgttccagccaccggcccagggcaatgaagacaa

SEQ ID NO: 11092 - RNA, 82 nt, synthetic construct
  source 1..82: mol_type = other RNA
aaggagcagctcttttctgaacctgaagctgctgttacctttgccaagtgttccagccaccggcccagggcaatgaatacaa

SEQ ID NO: 11093 - RNA, 82 nt, synthetic construct
  source 1..82: mol_type = other RNA
aaggagcagctcttttctgaacctgaagctgctgttacctttgccaagtgttccagccaccggcccagggcaatgaaaacaa

SEQ ID NO: 11094 - RNA, 83 nt, synthetic construct
  source 1..83: mol_type = other RNA
gaaggagcagctcttttctgaacctgaagctgctgttacctttgccaagtgttccagccaccggcccagggcaatgaagacaa

SEQ ID NO: 11095 - RNA, 83 nt, synthetic construct
  source 1..83: mol_type = other RNA
gaaggagcagctcttttctgaacctgaagctgctgttacctttgccaagtgttccagccaccggcccagggcaatgaatacaa

SEQ ID NO: 11096 - RNA, 83 nt, synthetic construct
  source 1..83: mol_type = other RNA
gaaggagcagctcttttctgaacctgaagctgctgttacctttgccaagtgttccagccaccggcccagggcaatgaaaacaa

SEQ ID NO: 11097 - RNA, 83 nt, synthetic construct
  source 1..83: mol_type = other RNA
gaaggagcagctcttttctgaacctgaagctgctgttacctttgccaagtgttccagccaccggcccagggcaatgaacacaa

SEQ ID NO: 11098 - RNA, 84 nt, synthetic construct
  source 1..84: mol_type = other RNA
tgaaggagcagctcttttctgaacctgaagctgctgttacctttgccaagtgttccagccaccggcccagggcaatgaacacaa

SEQ ID NO: 11099 - RNA, 84 nt, synthetic construct
  source 1..84: mol_type = other RNA
tgaaggagcagctcttttctgaacctgaagctgctgttacctttgccaagtgttccagccaccggcccagggcaatgaatacaa

SEQ ID NO: 11100 - RNA, 84 nt, synthetic construct
  source 1..84: mol_type = other RNA
tgaaggagcagctcttttctgaacctgaagctgctgttacctttgccaagtgttccagccaccggcccagggcaatgaaaacaa

SEQ ID NO: 11101 - RNA, 84 nt, synthetic construct
  source 1..84: mol_type = other RNA
tgaaggagcagctcttttctgaacctgaagctgctgttacctttgccaagtgttccagccaccggcccagggcaatgaagacaa

SEQ ID NO: 11102 - RNA, 85 nt, synthetic construct
  source 1..85: mol_type = other RNA
ctgaaggagcagctcttttctgaacctgaagctgctgttacctttgccaagtgttccagccaccggcccagggcaatgaatacaa

SEQ ID NO: 11103 - RNA, 85 nt, synthetic construct
  source 1..85: mol_type = other RNA
ctgaaggagcagctcttttctgaacctgaagctgctgttacctttgccaagtgttccagccaccggcccagggcaatgaaaacaa

SEQ ID NO: 11104 - RNA, 85 nt, synthetic construct
  source 1..85: mol_type = other RNA
ctgaaggagcagctcttttctgaacctgaagctgctgttacctttgccaagtgttccagccaccggcccagggcaatgaagacaa

SEQ ID NO: 11105 - RNA, 85 nt, synthetic construct
  source 1..85: mol_type = other RNA
ctgaaggagcagctcttttctgaacctgaagctgctgttacctttgccaagtgttccagccaccggcccagggcaatgaacacaa

SEQ ID NO: 11106 - RNA, 86 nt, synthetic construct
  source 1..86: mol_type = other RNA
actgaaggagcagctcttttctgaacctgaagctgctgttacctttgccaagtgttccagccaccggcccagggcaatgaagacaa

SEQ ID NO: 11107 - RNA, 86 nt, synthetic construct
  source 1..86: mol_type = other RNA
actgaaggagcagctcttttctgaacctgaagctgctgttacctttgccaagtgttccagccaccggcccagggcaatgaatacaa

SEQ ID NO: 11108 - RNA, 86 nt, synthetic construct
  source 1..86: mol_type = other RNA
actgaaggagcagctcttttctgaacctgaagctgctgttacctttgccaagtgttccagccaccggcccagggcaatgaacacaa

SEQ ID NO: 11109 - RNA, 86 nt, synthetic construct
  source 1..86: mol_type = other RNA
actgaaggagcagctcttttctgaacctgaagctgctgttacctttgccaagtgttccagccaccggcccagggcaatgaaaacaa

SEQ ID NO: 11110 - RNA, 87 nt, synthetic construct
  source 1..87: mol_type = other RNA
tactgaaggagcagctcttttctgaacctgaagctgctgttacctttgccaagtgttccagccaccggcccagggcaatgaatacaa

SEQ ID NO: 11111 - RNA, 87 nt, synthetic construct
  source 1..87: mol_type = other RNA
tactgaaggagcagctcttttctgaacctgaagctgctgttacctttgccaagtgttccagccaccggcccagggcaatgaaaacaa

SEQ ID NO: 11112 - RNA, 87 nt, synthetic construct
  source 1..87: mol_type = other RNA
tactgaaggagcagctcttttctgaacctgaagctgctgttacctttgccaagtgttccagccaccggcccagggcaatgaacacaa

SEQ ID NO: 11113 - RNA, 87 nt, synthetic construct
  source 1..87: mol_type = other RNA
tactgaaggagcagctcttttctgaacctgaagctgctgttacctttgccaagtgttccagccaccggcccagggcaatgaagacaa

SEQ ID NO: 11114 - RNA, 88 nt, synthetic construct
  source 1..88: mol_type = other RNA
ttactgaaggagcagctcttttctgaacctgaagctgctgttacctttgccaagtgttccagccaccggcccagggcaatgaacacaa

SEQ ID NO: 11115 - RNA, 88 nt, synthetic construct
  source 1..88: mol_type = other RNA
ttactgaaggagcagctcttttctgaacctgaagctgctgttacctttgccaagtgttccagccaccggcccagggcaatgaagacaa

SEQ ID NO: 11116 - RNA, 88 nt, synthetic construct
  source 1..88: mol_type = other RNA
ttactgaaggagcagctcttttctgaacctgaagctgctgttacctttgccaagtgttccagccaccggcccagggcaatgaatacaa

SEQ ID NO: 11117 - RNA, 88 nt, synthetic construct
  source 1..88: mol_type = other RNA
ttactgaaggagcagctcttttctgaacctgaagctgctgttacctttgccaagtgttccagccaccggcccagggcaatgaaaacaa

SEQ ID NO: 11118 - RNA, 89 nt, synthetic construct
  source 1..89: mol_type = other RNA
tttactgaaggagcagctcttttctgaacctgaagctgctgttacctttgccaagtgttccagccaccggcccagggcaatgaatacaa

SEQ ID NO: 11119 - RNA, 89 nt, synthetic construct
  source 1..89: mol_type = other RNA
tttactgaaggagcagctcttttctgaacctgaagctgctgttacctttgccaagtgttccagccaccggcccagggcaatgaacacaa

SEQ ID NO: 11120 - RNA, 89 nt, synthetic construct
  source 1..89: mol_type = other RNA
tttactgaaggagcagctcttttctgaacctgaagctgctgttacctttgccaagtgttccagccaccggcccagggcaatgaaaacaa

SEQ ID NO: 11121 - RNA, 89 nt, synthetic construct
  source 1..89: mol_type = other RNA
tttactgaaggagcagctcttttctgaacctgaagctgctgttacctttgccaagtgttccagccaccggcccagggcaatgaagacaa

SEQ ID NO: 11122 - RNA, 90 nt, synthetic construct
  source 1..90: mol_type = other RNA
gtttactgaaggagcagctcttttctgaacctgaagctgctgttacctttgccaagtgttccagccaccggcccagggcaatgaacacaa

SEQ ID NO: 11123 - RNA, 90 nt, synthetic construct
  source 1..90: mol_type = other RNA
gtttactgaaggagcagctcttttctgaacctgaagctgctgttacctttgccaagtgttccagccaccggcccagggcaatgaagacaa

SEQ ID NO: 11124 - RNA, 90 nt, synthetic construct
  source 1..90: mol_type = other RNA
gtttactgaaggagcagctcttttctgaacctgaagctgctgttacctttgccaagtgttccagccaccggcccagggcaatgaaaacaa

SEQ ID NO: 11125 - RNA, 90 nt, synthetic construct
  source 1..90: mol_type = other RNA
gtttactgaaggagcagctcttttctgaacctgaagctgctgttacctttgccaagtgttccagccaccggcccagggcaatgaatacaa

SEQ ID NO: 11126 - RNA, 91 nt, synthetic construct
  source 1..91: mol_type = other RNA
tgtttactgaaggagcagctcttttctgaacctgaagctgctgttacctttgccaagtgttccagccaccggcccagggcaatgaatacaa

SEQ ID NO: 11127 - RNA, 91 nt, synthetic construct
  source 1..91: mol_type = other RNA
tgtttactgaaggagcagctcttttctgaacctgaagctgctgttacctttgccaagtgttccagccaccggcccagggcaatgaagacaa

SEQ ID NO: 11128 - RNA, 91 nt, synthetic construct
  source 1..91: mol_type = other RNA
tgtttactgaaggagcagctcttttctgaacctgaagctgctgttacctttgccaagtgttccagccaccggcccagggcaatgaaaacaa

SEQ ID NO: 11129 - RNA, 91 nt, synthetic construct
  source 1..91: mol_type = other RNA
tgtttactgaaggagcagctcttttctgaacctgaagctgctgttacctttgccaagtgttccagccaccggcccagggcaatgaacacaa

SEQ ID NO: 11130 - RNA, 92 nt, synthetic construct
  source 1..92: mol_type = other RNA
ttgtttactgaaggagcagctcttttctgaacctgaagctgctgttacctttgccaagtgttccagccaccggcccagggcaatgaagacaa

SEQ ID NO: 11131 - RNA, 92 nt, synthetic construct
  source 1..92: mol_type = other RNA
ttgtttactgaaggagcagctcttttctgaacctgaagctgctgttacctttgccaagtgttccagccaccggcccagggcaatgaaaacaa

SEQ ID NO: 11132 - RNA, 92 nt, synthetic construct
  source 1..92: mol_type = other RNA
ttgtttactgaaggagcagctcttttctgaacctgaagctgctgttacctttgccaagtgttccagccaccggcccagggcaatgaacacaa

SEQ ID NO: 11133 - RNA, 92 nt, synthetic construct
  source 1..92: mol_type = other RNA
ttgtttactgaaggagcagctcttttctgaacctgaagctgctgttacctttgccaagtgttccagccaccggcccagggcaatgaatacaa

SEQ ID NO: 11134 - RNA, 93 nt, synthetic construct
  source 1..93: mol_type = other RNA
tttgtttactgaaggagcagctcttttctgaacctgaagctgctgttacctttgccaagtgttccagccaccggcccagggcaatgaagacaa

SEQ ID NO: 11135 - RNA, 93 nt, synthetic construct
  source 1..93: mol_type = other RNA
tttgtttactgaaggagcagctcttttctgaacctgaagctgctgttacctttgccaagtgttccagccaccggcccagggcaatgaatacaa

SEQ ID NO: 11136 - RNA, 93 nt, synthetic construct
  source 1..93: mol_type = other RNA
tttgtttactgaaggagcagctcttttctgaacctgaagctgctgttacctttgccaagtgttccagccaccggcccagggcaatgaacacaa

SEQ ID NO: 11137 - RNA, 93 nt, synthetic construct
  source 1..93: mol_type = other RNA
tttgtttactgaaggagcagctcttttctgaacctgaagctgctgttacctttgccaagtgttccagccaccggcccagggcaatgaaaacaa

SEQ ID NO: 11138 - RNA, 94 nt, synthetic construct
  source 1..94: mol_type = other RNA
atttgtttactgaaggagcagctcttttctgaacctgaagctgctgttacctttgccaagtgttccagccaccggcccagggcaatgaacacaa

SEQ ID NO: 11139 - RNA, 94 nt, synthetic construct
  source 1..94: mol_type = other RNA
atttgtttactgaaggagcagctcttttctgaacctgaagctgctgttacctttgccaagtgttccagccaccggcccagggcaatgaatacaa

SEQ ID NO: 11140 - RNA, 94 nt, synthetic construct
  source 1..94: mol_type = other RNA
atttgtttactgaaggagcagctcttttctgaacctgaagctgctgttacctttgccaagtgttccagccaccggcccagggcaatgaagacaa

SEQ ID NO: 11141 - RNA, 94 nt, synthetic construct
  source 1..94: mol_type = other RNA
atttgtttactgaaggagcagctcttttctgaacctgaagctgctgttacctttgccaagtgttccagccaccggcccagggcaatgaaaacaa

SEQ ID NO: 11142 - RNA, 95 nt, synthetic construct
  source 1..95: mol_type = other RNA
gatttgtttactgaaggagcagctcttttctgaacctgaagctgctgttacctttgccaagtgttccagccaccggcccagggcaatgaacacaa

SEQ ID NO: 11143 - RNA, 95 nt, synthetic construct
  source 1..95: mol_type = other RNA
gatttgtttactgaaggagcagctcttttctgaacctgaagctgctgttacctttgccaagtgttccagccaccggcccagggcaatgaagacaa

SEQ ID NO: 11144 - RNA, 95 nt, synthetic construct
  source 1..95: mol_type = other RNA
gatttgtttactgaaggagcagctcttttctgaacctgaagctgctgttacctttgccaagtgttccagccaccggcccagggcaatgaatacaa

SEQ ID NO: 11145 - RNA, 95 nt, synthetic construct
  source 1..95: mol_type = other RNA
gatttgtttactgaaggagcagctcttttctgaacctgaagctgctgttacctttgccaagtgttccagccaccggcccagggcaatgaaaacaa

SEQ ID NO: 11146 - RNA, 96 nt, synthetic construct
  source 1..96: mol_type = other RNA
agatttgtttactgaaggagcagctcttttctgaacctgaagctgctgttacctttgccaagtgttccagccaccggcccagggcaatgaagacaa

SEQ ID NO: 11147 - RNA, 96 nt, synthetic construct
  source 1..96: mol_type = other RNA
agatttgtttactgaaggagcagctcttttctgaacctgaagctgctgttacctttgccaagtgttccagccaccggcccagggcaatgaatacaa

SEQ ID NO: 11148 - RNA, 96 nt, synthetic construct
  source 1..96: mol_type = other RNA
agatttgtttactgaaggagcagctcttttctgaacctgaagctgctgttacctttgccaagtgttccagccaccggcccagggcaatgaaaacaa

SEQ ID NO: 11149 - RNA, 96 nt, synthetic construct
  source 1..96: mol_type = other RNA
agatttgtttactgaaggagcagctcttttctgaacctgaagctgctgttacctttgccaagtgttccagccaccggcccagggcaatgaacacaa

SEQ ID NO: 11150 - RNA, 97 nt, synthetic construct
  source 1..97: mol_type = other RNA
gagatttgtttactgaaggagcagctcttttctgaacctgaagctgctgttacctttgccaagtgttccagccaccggcccagggcaatgaacacaa

SEQ ID NO: 11151 - RNA, 97 nt, synthetic construct
  source 1..97: mol_type = other RNA
gagatttgtttactgaaggagcagctcttttctgaacctgaagctgctgttacctttgccaagtgttccagccaccggcccagggcaatgaatacaa

SEQ ID NO: 11152 - RNA, 97 nt, synthetic construct
  source 1..97: mol_type = other RNA
gagatttgtttactgaaggagcagctcttttctgaacctgaagctgctgttacctttgccaagtgttccagccaccggcccagggcaatgaaaacaa

SEQ ID NO: 11153 - RNA, 97 nt, synthetic construct
  source 1..97: mol_type = other RNA
gagatttgtttactgaaggagcagctcttttctgaacctgaagctgctgttacctttgccaagtgttccagccaccggcccagggcaatgaagacaa

SEQ ID NO: 11154 - RNA, 98 nt, synthetic construct
  source 1..98: mol_type = other RNA
tgagatttgtttactgaaggagcagctcttttctgaacctgaagctgctgttacctttgccaagtgttccagccaccggcccagggcaatgaagacaa

SEQ ID NO: 11155 - RNA, 98 nt, synthetic construct
  source 1..98: mol_type = other RNA
tgagatttgtttactgaaggagcagctcttttctgaacctgaagctgctgttacctttgccaagtgttccagccaccggcccagggcaatgaatacaa

SEQ ID NO: 11156 - RNA, 98 nt, synthetic construct
  source 1..98: mol_type = other RNA
tgagatttgtttactgaaggagcagctcttttctgaacctgaagctgctgttacctttgccaagtgttccagccaccggcccagggcaatgaaaacaa

SEQ ID NO: 11157 - RNA, 98 nt, synthetic construct
  source 1..98: mol_type = other RNA
tgagatttgtttactgaaggagcagctcttttctgaacctgaagctgctgttacctttgccaagtgttccagccaccggcccagggcaatgaacacaa

SEQ ID NO: 11158 - RNA, 99 nt, synthetic construct
  source 1..99: mol_type = other RNA
gtgagatttgtttactgaaggagcagctcttttctgaacctgaagctgctgttacctttgccaagtgttccagccaccggcccagggcaatgaacacaa

SEQ ID NO: 11159 - RNA, 99 nt, synthetic construct
  source 1..99: mol_type = other RNA
gtgagatttgtttactgaaggagcagctcttttctgaacctgaagctgctgttacctttgccaagtgttccagccaccggcccagggcaatgaagacaa

SEQ ID NO: 11160 - RNA, 99 nt, synthetic construct
  source 1..99: mol_type = other RNA
gtgagatttgtttactgaaggagcagctcttttctgaacctgaagctgctgttacctttgccaagtgttccagccaccggcccagggcaatgaaaacaa

SEQ ID NO: 11161 - RNA, 99 nt, synthetic construct
  source 1..99: mol_type = other RNA
gtgagatttgtttactgaaggagcagctcttttctgaacctgaagctgctgttacctttgccaagtgttccagccaccggcccagggcaatgaatacaa

SEQ ID NO: 11162 - RNA, 100 nt, synthetic construct
  source 1..100: mol_type = other RNA
agtgagatttgtttactgaaggagcagctcttttctgaacctgaagctgctgttacctttgccaagtgttccagccaccggcccagggcaatgaatacaa

SEQ ID NO: 11163 - RNA, 100 nt, synthetic construct
  source 1..100: mol_type = other RNA
agtgagatttgtttactgaaggagcagctcttttctgaacctgaagctgctgttacctttgccaagtgttccagccaccggcccagggcaatgaagacaa

SEQ ID NO: 11164 - RNA, 100 nt, synthetic construct
  source 1..100: mol_type = other RNA
agtgagatttgtttactgaaggagcagctcttttctgaacctgaagctgctgttacctttgccaagtgttccagccaccggcccagggcaatgaaaacaa

SEQ ID NO: 11165 - RNA, 100 nt, synthetic construct
  source 1..100: mol_type = other RNA
agtgagatttgtttactgaaggagcagctcttttctgaacctgaagctgctgttacctttgccaagtgttccagccaccggcccagggcaatgaacacaa

SEQ ID NO: 11166 - RNA, 20 nt, synthetic construct
  source 1..20: mol_type = other RNA
ccagggcaatgaatacaaag

SEQ ID NO: 11167 - RNA, 20 nt, synthetic construct
  source 1..20: mol_type = other RNA
ccagggcaatgaaaacaaag

SEQ ID NO: 11168 - RNA, 20 nt, synthetic construct
  source 1..20: mol_type = other RNA
ccagggcaatgaagacaaag

SEQ ID NO: 11169 - RNA, 20 nt, synthetic construct
  source 1..20: mol_type = other RNA
gcccagggcaatgaagacaa

SEQ ID NO: 11170 - RNA, 20 nt, synthetic construct
  source 1..20: mol_type = other RNA
gcccagggcaatgaaaacaa

SEQ ID NO: 11171 - RNA, 20 nt, synthetic construct
  source 1..20: mol_type = other RNA
gcccagggcaatgaatacaa

SEQ ID NO: 11172 - RNA, 16 nt, synthetic construct
  source 1..16: mol_type = other RNA
tgctctttgtgttcat

SEQ ID NO: 11173 - RNA, 17 nt, synthetic construct
  source 1..17: mol_type = other RNA
atgctctttgtgttcat

SEQ ID NO: 11174 - RNA, 18 nt, synthetic construct
  source 1..18: mol_type = other RNA
catgctctttgtgttcat

SEQ ID NO: 11175 - RNA, 19 nt, synthetic construct
  source 1..19: mol_type = other RNA
ccatgctctttgtgttcat

SEQ ID NO: 11176 - RNA, 20 nt, synthetic construct
  source 1..20: mol_type = other RNA
cccatgctctttgtgttcat

SEQ ID NO: 11177 - RNA, 21 nt, synthetic construct
  source 1..21: mol_type = other RNA
ccccatgctctttgtgttcat

SEQ ID NO: 11178 - RNA, 22 nt, synthetic construct
  source 1..22: mol_type = other RNA
cccccatgctctttgtgttcat

SEQ ID NO: 11179-11182 - skipped (4 entries)

SEQ ID NO: 11183 - RNA, 10 nt, synthetic construct
  source 1..10: mol_type = other RNA
aacacaaaga

SEQ ID NO: 11184 - RNA, 11 nt, synthetic construct
  source 1..11: mol_type = other RNA
aacacaaagag

SEQ ID NO: 11185 - RNA, 12 nt, synthetic construct
  source 1..12: mol_type = other RNA
aacacaaagagc

SEQ ID NO: 11186 - RNA, 13 nt, synthetic construct
  source 1..13: mol_type = other RNA
aacacaaagagca

SEQ ID NO: 11187 - RNA, 14 nt, synthetic construct
  source 1..14: mol_type = other RNA
aacacaaagagcat

SEQ ID NO: 11188 - RNA, 15 nt, synthetic construct
  source 1..15: mol_type = other RNA
aacacaaagagcatg

SEQ ID NO: 11189 - RNA, 16 nt, synthetic construct
  source 1..16: mol_type = other RNA
aacacaaagagcatgg

SEQ ID NO: 11190 - RNA, 17 nt, synthetic construct
  source 1..17: mol_type = other RNA
aacacaaagagcatggg

SEQ ID NO: 11191 - RNA, 18 nt, synthetic construct
  source 1..18: mol_type = other RNA
aacacaaagagcatgggg

SEQ ID NO: 11192 - RNA, 19 nt, synthetic construct
  source 1..19: mol_type = other RNA
aacacaaagagcatggggg

SEQ ID NO: 11193 - RNA, 15 nt, synthetic construct
  source 1..15: mol_type = other RNA
cggcccagggcaatg

SEQ ID NO: 11194 - RNA, 16 nt, synthetic construct
  source 1..16: mol_type = other RNA
ccggcccagggcaatg

SEQ ID NO: 11195 - RNA, 17 nt, synthetic construct
  source 1..17: mol_type = other RNA
accggcccagggcaatg

SEQ ID NO: 11196 - RNA, 18 nt, synthetic construct
  source 1..18: mol_type = other RNA
caccggcccagggcaatg

SEQ ID NO: 11197 - RNA, 19 nt, synthetic construct
  source 1..19: mol_type = other RNA
ccaccggcccagggcaatg

SEQ ID NO: 11198 - RNA, 20 nt, synthetic construct
  source 1..20: mol_type = other RNA
gccaccggcccagggcaatg

SEQ ID NO: 11199 - RNA, 21 nt, synthetic construct
  source 1..21: mol_type = other RNA
agccaccggcccagggcaatg

SEQ ID NO: 11200 - RNA, 22 nt, synthetic construct
  source 1..22: mol_type = other RNA
cagccaccggcccagggcaatg

SEQ ID NO: 11201 - RNA, 23 nt, synthetic construct
  source 1..23: mol_type = other RNA
ccagccaccggcccagggcaatg

SEQ ID NO: 11202 - RNA, 24 nt, synthetic construct
  source 1..24: mol_type = other RNA
tccagccaccggcccagggcaatg

SEQ ID NO: 11203 - RNA, 25 nt, synthetic construct
  source 1..25: mol_type = other RNA
ttccagccaccggcccagggcaatg

SEQ ID NO: 11204 - RNA, 26 nt, synthetic construct
  source 1..26: mol_type = other RNA
gttccagccaccggcccagggcaatg

SEQ ID NO: 11205 - RNA, 27 nt, synthetic construct
  source 1..27: mol_type = other RNA
tgttccagccaccggcccagggcaatg

SEQ ID NO: 11206 - RNA, 28 nt, synthetic construct
  source 1..28: mol_type = other RNA
gtgttccagccaccggcccagggcaatg

SEQ ID NO: 11207 - RNA, 29 nt, synthetic construct
  source 1..29: mol_type = other RNA
agtgttccagccaccggcccagggcaatg

SEQ ID NO: 11208 - RNA, 30 nt, synthetic construct
  source 1..30: mol_type = other RNA
aagtgttccagccaccggcccagggcaatg

SEQ ID NO: 11209 - RNA, 31 nt, synthetic construct
  source 1..31: mol_type = other RNA
caagtgttccagccaccggcccagggcaatg

SEQ ID NO: 11210 - RNA, 32 nt, synthetic construct
  source 1..32: mol_type = other RNA
ccaagtgttccagccaccggcccagggcaatg

SEQ ID NO: 11211 - RNA, 33 nt, synthetic construct
  source 1..33: mol_type = other RNA
gccaagtgttccagccaccggcccagggcaatg

SEQ ID NO: 11212 - RNA, 34 nt, synthetic construct
  source 1..34: mol_type = other RNA
tgccaagtgttccagccaccggcccagggcaatg

SEQ ID NO: 11213 - RNA, 35 nt, synthetic construct
  source 1..35: mol_type = other RNA
ttgccaagtgttccagccaccggcccagggcaatg

SEQ ID NO: 11214 - RNA, 36 nt, synthetic construct
  source 1..36: mol_type = other RNA
tttgccaagtgttccagccaccggcccagggcaatg

SEQ ID NO: 11215 - RNA, 37 nt, synthetic construct
  source 1..37: mol_type = other RNA
ctttgccaagtgttccagccaccggcccagggcaatg

SEQ ID NO: 11216 - RNA, 38 nt, synthetic construct
  source 1..38: mol_type = other RNA
cctttgccaagtgttccagccaccggcccagggcaatg

SEQ ID NO: 11217 - RNA, 39 nt, synthetic construct
  source 1..39: mol_type = other RNA
acctttgccaagtgttccagccaccggcccagggcaatg

SEQ ID NO: 11218 - RNA, 40 nt, synthetic construct
  source 1..40: mol_type = other RNA
tacctttgccaagtgttccagccaccggcccagggcaatg

SEQ ID NO: 11219 - RNA, 41 nt, synthetic construct
  source 1..41: mol_type = other RNA
ttacctttgccaagtgttccagccaccggcccagggcaatg

SEQ ID NO: 11220 - RNA, 42 nt, synthetic construct
  source 1..42: mol_type = other RNA
gttacctttgccaagtgttccagccaccggcccagggcaatg

SEQ ID NO: 11221 - RNA, 43 nt, synthetic construct
  source 1..43: mol_type = other RNA
tgttacctttgccaagtgttccagccaccggcccagggcaatg

SEQ ID NO: 11222 - RNA, 44 nt, synthetic construct
  source 1..44: mol_type = other RNA
ctgttacctttgccaagtgttccagccaccggcccagggcaatg

SEQ ID NO: 11223 - RNA, 45 nt, synthetic construct
  source 1..45: mol_type = other RNA
gctgttacctttgccaagtgttccagccaccggcccagggcaatg

SEQ ID NO: 11224 - RNA, 46 nt, synthetic construct
  source 1..46: mol_type = other RNA
tgctgttacctttgccaagtgttccagccaccggcccagggcaatg

SEQ ID NO: 11225 - RNA, 47 nt, synthetic construct
  source 1..47: mol_type = other RNA
ctgctgttacctttgccaagtgttccagccaccggcccagggcaatg

SEQ ID NO: 11226 - RNA, 48 nt, synthetic construct
  source 1..48: mol_type = other RNA
gctgctgttacctttgccaagtgttccagccaccggcccagggcaatg

SEQ ID NO: 11227 - RNA, 49 nt, synthetic construct
  source 1..49: mol_type = other RNA
agctgctgttacctttgccaagtgttccagccaccggcccagggcaatg

SEQ ID NO: 11228 - RNA, 50 nt, synthetic construct
  source 1..50: mol_type = other RNA
aagctgctgttacctttgccaagtgttccagccaccggcccagggcaatg

SEQ ID NO: 11229 - RNA, 51 nt, synthetic construct
  source 1..51: mol_type = other RNA
gaagctgctgttacctttgccaagtgttccagccaccggcccagggcaatg

SEQ ID NO: 11230 - RNA, 52 nt, synthetic construct
  source 1..52: mol_type = other RNA
tgaagctgctgttacctttgccaagtgttccagccaccggcccagggcaatg

SEQ ID NO: 11231 - RNA, 53 nt, synthetic construct
  source 1..53: mol_type = other RNA
ctgaagctgctgttacctttgccaagtgttccagccaccggcccagggcaatg

SEQ ID NO: 11232 - RNA, 54 nt, synthetic construct
  source 1..54: mol_type = other RNA
cctgaagctgctgttacctttgccaagtgttccagccaccggcccagggcaatg

SEQ ID NO: 11233 - RNA, 55 nt, synthetic construct
  source 1..55: mol_type = other RNA
acctgaagctgctgttacctttgccaagtgttccagccaccggcccagggcaatg

SEQ ID NO: 11234 - RNA, 56 nt, synthetic construct
  source 1..56: mol_type = other RNA
aacctgaagctgctgttacctttgccaagtgttccagccaccggcccagggcaatg

SEQ ID NO: 11235 - RNA, 57 nt, synthetic construct
  source 1..57: mol_type = other RNA
gaacctgaagctgctgttacctttgccaagtgttccagccaccggcccagggcaatg

SEQ ID NO: 11236 - RNA, 58 nt, synthetic construct
  source 1..58: mol_type = other RNA
tgaacctgaagctgctgttacctttgccaagtgttccagccaccggcccagggcaatg

SEQ ID NO: 11237 - RNA, 59 nt, synthetic construct
  source 1..59: mol_type = other RNA
ctgaacctgaagctgctgttacctttgccaagtgttccagccaccggcccagggcaatg

SEQ ID NO: 11238 - RNA, 60 nt, synthetic construct
  source 1..60: mol_type = other RNA
tctgaacctgaagctgctgttacctttgccaagtgttccagccaccggcccagggcaatg

SEQ ID NO: 11239 - RNA, 61 nt, synthetic construct
  source 1..61: mol_type = other RNA
ttctgaacctgaagctgctgttacctttgccaagtgttccagccaccggcccagggcaatg

SEQ ID NO: 11240 - RNA, 62 nt, synthetic construct
  source 1..62: mol_type = other RNA
tttctgaacctgaagctgctgttacctttgccaagtgttccagccaccggcccagggcaatg

SEQ ID NO: 11241 - RNA, 63 nt, synthetic construct
  source 1..63: mol_type = other RNA
ttttctgaacctgaagctgctgttacctttgccaagtgttccagccaccggcccagggcaatg

SEQ ID NO: 11242 - RNA, 64 nt, synthetic construct
  source 1..64: mol_type = other RNA
cttttctgaacctgaagctgctgttacctttgccaagtgttccagccaccggcccagggcaatg

SEQ ID NO: 11243 - RNA, 65 nt, synthetic construct
  source 1..65: mol_type = other RNA
tcttttctgaacctgaagctgctgttacctttgccaagtgttccagccaccggcccagggcaatg

SEQ ID NO: 11244 - RNA, 66 nt, synthetic construct
  source 1..66: mol_type = other RNA
ctcttttctgaacctgaagctgctgttacctttgccaagtgttccagccaccggcccagggcaatg

SEQ ID NO: 11245 - RNA, 67 nt, synthetic construct
  source 1..67: mol_type = other RNA
gctcttttctgaacctgaagctgctgttacctttgccaagtgttccagccaccggcccagggcaatg

SEQ ID NO: 11246 - RNA, 68 nt, synthetic construct
  source 1..68: mol_type = other RNA
agctcttttctgaacctgaagctgctgttacctttgccaagtgttccagccaccggcccagggcaatg

SEQ ID NO: 11247 - RNA, 69 nt, synthetic construct
  source 1..69: mol_type = other RNA
cagctcttttctgaacctgaagctgctgttacctttgccaagtgttccagccaccggcccagggcaatg

SEQ ID NO: 11248 - RNA, 70 nt, synthetic construct
  source 1..70: mol_type = other RNA
gcagctcttttctgaacctgaagctgctgttacctttgccaagtgttccagccaccggcccagggcaatg

SEQ ID NO: 11249 - RNA, 71 nt, synthetic construct
  source 1..71: mol_type = other RNA
agcagctcttttctgaacctgaagctgctgttacctttgccaagtgttccagccaccggcccagggcaatg

SEQ ID NO: 11250 - RNA, 72 nt, synthetic construct
  source 1..72: mol_type = other RNA
gagcagctcttttctgaacctgaagctgctgttacctttgccaagtgttccagccaccggcccagggcaatg

SEQ ID NO: 11251 - RNA, 73 nt, synthetic construct
  source 1..73: mol_type = other RNA
ggagcagctcttttctgaacctgaagctgctgttacctttgccaagtgttccagccaccggcccagggcaatg

SEQ ID NO: 11252 - RNA, 74 nt, synthetic construct
  source 1..74: mol_type = other RNA
aggagcagctcttttctgaacctgaagctgctgttacctttgccaagtgttccagccaccggcccagggcaatg

SEQ ID NO: 11253 - RNA, 75 nt, synthetic construct
  source 1..75: mol_type = other RNA
aaggagcagctcttttctgaacctgaagctgctgttacctttgccaagtgttccagccaccggcccagggcaatg

SEQ ID NO: 11254 - RNA, 76 nt, synthetic construct
  source 1..76: mol_type = other RNA
gaaggagcagctcttttctgaacctgaagctgctgttacctttgccaagtgttccagccaccggcccagggcaatg

SEQ ID NO: 11255 - RNA, 77 nt, synthetic construct
  source 1..77: mol_type = other RNA
tgaaggagcagctcttttctgaacctgaagctgctgttacctttgccaagtgttccagccaccggcccagggcaatg

SEQ ID NO: 11256 - RNA, 78 nt, synthetic construct
  source 1..78: mol_type = other RNA
ctgaaggagcagctcttttctgaacctgaagctgctgttacctttgccaagtgttccagccaccggcccagggcaatg

SEQ ID NO: 11257 - RNA, 79 nt, synthetic construct
  source 1..79: mol_type = other RNA
actgaaggagcagctcttttctgaacctgaagctgctgttacctttgccaagtgttccagccaccggcccagggcaatg

SEQ ID NO: 11258 - RNA, 80 nt, synthetic construct
  source 1..80: mol_type = other RNA
tactgaaggagcagctcttttctgaacctgaagctgctgttacctttgccaagtgttccagccaccggcccagggcaatg

SEQ ID NO: 11259 - RNA, 81 nt, synthetic construct
  source 1..81: mol_type = other RNA
ttactgaaggagcagctcttttctgaacctgaagctgctgttacctttgccaagtgttccagccaccggcccagggcaatg

SEQ ID NO: 11260 - RNA, 82 nt, synthetic construct
  source 1..82: mol_type = other RNA
tttactgaaggagcagctcttttctgaacctgaagctgctgttacctttgccaagtgttccagccaccggcccagggcaatg

SEQ ID NO: 11261 - RNA, 83 nt, synthetic construct
  source 1..83: mol_type = other RNA
gtttactgaaggagcagctcttttctgaacctgaagctgctgttacctttgccaagtgttccagccaccggcccagggcaatg

SEQ ID NO: 11262 - RNA, 84 nt, synthetic construct
  source 1..84: mol_type = other RNA
tgtttactgaaggagcagctcttttctgaacctgaagctgctgttacctttgccaagtgttccagccaccggcccagggcaatg

SEQ ID NO: 11263 - RNA, 85 nt, synthetic construct
  source 1..85: mol_type = other RNA
ttgtttactgaaggagcagctcttttctgaacctgaagctgctgttacctttgccaagtgttccagccaccggcccagggcaatg

SEQ ID NO: 11264 - RNA, 86 nt, synthetic construct
  source 1..86: mol_type = other RNA
tttgtttactgaaggagcagctcttttctgaacctgaagctgctgttacctttgccaagtgttccagccaccggcccagggcaatg

SEQ ID NO: 11265 - RNA, 87 nt, synthetic construct
  source 1..87: mol_type = other RNA
atttgtttactgaaggagcagctcttttctgaacctgaagctgctgttacctttgccaagtgttccagccaccggcccagggcaatg

SEQ ID NO: 11266 - RNA, 88 nt, synthetic construct
  source 1..88: mol_type = other RNA
gatttgtttactgaaggagcagctcttttctgaacctgaagctgctgttacctttgccaagtgttccagccaccggcccagggcaatg

SEQ ID NO: 11267 - RNA, 89 nt, synthetic construct
  source 1..89: mol_type = other RNA
agatttgtttactgaaggagcagctcttttctgaacctgaagctgctgttacctttgccaagtgttccagccaccggcccagggcaatg

SEQ ID NO: 11268 - RNA, 90 nt, synthetic construct
  source 1..90: mol_type = other RNA
gagatttgtttactgaaggagcagctcttttctgaacctgaagctgctgttacctttgccaagtgttccagccaccggcccagggcaatg

SEQ ID NO: 11269 - RNA, 91 nt, synthetic construct
  source 1..91: mol_type = other RNA
tgagatttgtttactgaaggagcagctcttttctgaacctgaagctgctgttacctttgccaagtgttccagccaccggcccagggcaatg

SEQ ID NO: 11270 - RNA, 92 nt, synthetic construct
  source 1..92: mol_type = other RNA
gtgagatttgtttactgaaggagcagctcttttctgaacctgaagctgctgttacctttgccaagtgttccagccaccggcccagggcaatg

SEQ ID NO: 11271 - RNA, 93 nt, synthetic construct
  source 1..93: mol_type = other RNA
agtgagatttgtttactgaaggagcagctcttttctgaacctgaagctgctgttacctttgccaagtgttccagccaccggcccagggcaatg

SEQ ID NO: 11272 - RNA, 94 nt, synthetic construct
  source 1..94: mol_type = other RNA
aagtgagatttgtttactgaaggagcagctcttttctgaacctgaagctgctgttacctttgccaagtgttccagccaccggcccagggcaatg

SEQ ID NO: 11273 - RNA, 95 nt, synthetic construct
  source 1..95: mol_type = other RNA
gaagtgagatttgtttactgaaggagcagctcttttctgaacctgaagctgctgttacctttgccaagtgttccagccaccggcccagggcaatg

SEQ ID NO: 11274 - RNA, 96 nt, synthetic construct
  source 1..96: mol_type = other RNA
ggaagtgagatttgtttactgaaggagcagctcttttctgaacctgaagctgctgttacctttgccaagtgttccagccaccggcccagggcaatg

SEQ ID NO: 11275 - RNA, 97 nt, synthetic construct
  source 1..97: mol_type = other RNA
aggaagtgagatttgtttactgaaggagcagctcttttctgaacctgaagctgctgttacctttgccaagtgttccagccaccggcccagggcaatg

SEQ ID NO: 11276 - RNA, 98 nt, synthetic construct
  source 1..98: mol_type = other RNA
gaggaagtgagatttgtttactgaaggagcagctcttttctgaacctgaagctgctgttacctttgccaagtgttccagccaccggcccagggcaatg

SEQ ID NO: 11277 - RNA, 99 nt, synthetic construct
  source 1..99: mol_type = other RNA
agaggaagtgagatttgtttactgaaggagcagctcttttctgaacctgaagctgctgttacctttgccaagtgttccagccaccggcccagggcaatg

SEQ ID NO: 11278 - RNA, 100 nt, synthetic construct
  source 1..100: mol_type = other RNA
cagaggaagtgagatttgtttactgaaggagcagctcttttctgaacctgaagctgctgttacctttgccaagtgttccagccaccggcccagggcaatg

SEQ ID NO: 11279 - RNA, 16 nt, synthetic construct
  source 1..16: mol_type = other RNA
tgtgttcattgccctg

SEQ ID NO: 11280 - RNA, 17 nt, synthetic construct
  source 1..17: mol_type = other RNA
ttgtgttcattgccctg

SEQ ID NO: 11281 - RNA, 18 nt, synthetic construct
  source 1..18: mol_type = other RNA
tttgtgttcattgccctg

SEQ ID NO: 11282 - RNA, 19 nt, synthetic construct
  source 1..19: mol_type = other RNA
ctttgtgttcattgccctg

SEQ ID NO: 11283 - RNA, 20 nt, synthetic construct
  source 1..20: mol_type = other RNA
tctttgtgttcattgccctg

SEQ ID NO: 11284 - RNA, 21 nt, synthetic construct
  source 1..21: mol_type = other RNA
ctctttgtgttcattgccctg

SEQ ID NO: 11285 - RNA, 22 nt, synthetic construct
  source 1..22: mol_type = other RNA
gctctttgtgttcattgccctg

SEQ ID NO: 11286-11291 - skipped (6 entries)

SEQ ID NO: 11292 - RNA, 10 nt, synthetic construct
  source 1..10: mol_type = other RNA
ggcaatgaac

SEQ ID NO: 11293 - RNA, 11 nt, synthetic construct
  source 1..11: mol_type = other RNA
ggcaatgaaca

SEQ ID NO: 11294 - RNA, 12 nt, synthetic construct
  source 1..12: mol_type = other RNA
ggcaatgaacac

SEQ ID NO: 11295 - RNA, 13 nt, synthetic construct
  source 1..13: mol_type = other RNA
ggcaatgaacaca

SEQ ID NO: 11296 - RNA, 14 nt, synthetic construct
  source 1..14: mol_type = other RNA
ggcaatgaacacaa

SEQ ID NO: 11297 - RNA, 15 nt, synthetic construct
  source 1..15: mol_type = other RNA
ggcaatgaacacaaa

SEQ ID NO: 11298 - RNA, 16 nt, synthetic construct
  source 1..16: mol_type = other RNA
ggcaatgaacacaaag

SEQ ID NO: 11299 - RNA, 17 nt, synthetic construct
  source 1..17: mol_type = other RNA
ggcaatgaacacaaaga

SEQ ID NO: 11300 - RNA, 18 nt, synthetic construct
  source 1..18: mol_type = other RNA
ggcaatgaacacaaagag

SEQ ID NO: 11301 - RNA, 19 nt, synthetic construct
  source 1..19: mol_type = other RNA
ggcaatgaacacaaagagc

SEQ ID NO: 11302 - RNA, 10 nt, synthetic construct
  source 1..10: mol_type = other RNA
accggcccag

SEQ ID NO: 11303 - RNA, 11 nt, synthetic construct
  source 1..11: mol_type = other RNA
caccggcccag

SEQ ID NO: 11304 - RNA, 12 nt, synthetic construct
  source 1..12: mol_type = other RNA
ccaccggcccag

SEQ ID NO: 11305 - RNA, 13 nt, synthetic construct
  source 1..13: mol_type = other RNA
gccaccggcccag

SEQ ID NO: 11306 - RNA, 14 nt, synthetic construct
  source 1..14: mol_type = other RNA
agccaccggcccag

SEQ ID NO: 11307 - RNA, 15 nt, synthetic construct
  source 1..15: mol_type = other RNA
cagccaccggcccag

SEQ ID NO: 11308 - RNA, 16 nt, synthetic construct
  source 1..16: mol_type = other RNA
ccagccaccggcccag

SEQ ID NO: 11309 - RNA, 17 nt, synthetic construct
  source 1..17: mol_type = other RNA
tccagccaccggcccag

SEQ ID NO: 11310 - RNA, 18 nt, synthetic construct
  source 1..18: mol_type = other RNA
ttccagccaccggcccag

SEQ ID NO: 11311 - RNA, 19 nt, synthetic construct
  source 1..19: mol_type = other RNA
gttccagccaccggcccag

SEQ ID NO: 11312 - RNA, 20 nt, synthetic construct
  source 1..20: mol_type = other RNA
tgttccagccaccggcccag

SEQ ID NO: 11313 - RNA, 21 nt, synthetic construct
  source 1..21: mol_type = other RNA
gtgttccagccaccggcccag

SEQ ID NO: 11314 - RNA, 22 nt, synthetic construct
  source 1..22: mol_type = other RNA
agtgttccagccaccggcccag

SEQ ID NO: 11315 - RNA, 23 nt, synthetic construct
  source 1..23: mol_type = other RNA
aagtgttccagccaccggcccag

SEQ ID NO: 11316 - RNA, 24 nt, synthetic construct
  source 1..24: mol_type = other RNA
caagtgttccagccaccggcccag

SEQ ID NO: 11317 - RNA, 25 nt, synthetic construct
  source 1..25: mol_type = other RNA
ccaagtgttccagccaccggcccag

SEQ ID NO: 11318 - RNA, 26 nt, synthetic construct
  source 1..26: mol_type = other RNA
gccaagtgttccagccaccggcccag

SEQ ID NO: 11319 - RNA, 27 nt, synthetic construct
  source 1..27: mol_type = other RNA
tgccaagtgttccagccaccggcccag

SEQ ID NO: 11320 - RNA, 28 nt, synthetic construct
  source 1..28: mol_type = other RNA
ttgccaagtgttccagccaccggcccag

SEQ ID NO: 11321 - RNA, 29 nt, synthetic construct
  source 1..29: mol_type = other RNA
tttgccaagtgttccagccaccggcccag

SEQ ID NO: 11322 - RNA, 30 nt, synthetic construct
  source 1..30: mol_type = other RNA
ctttgccaagtgttccagccaccggcccag

SEQ ID NO: 11323 - RNA, 31 nt, synthetic construct
  source 1..31: mol_type = other RNA
cctttgccaagtgttccagccaccggcccag

SEQ ID NO: 11324 - RNA, 32 nt, synthetic construct
  source 1..32: mol_type = other RNA
acctttgccaagtgttccagccaccggcccag

SEQ ID NO: 11325 - RNA, 33 nt, synthetic construct
  source 1..33: mol_type = other RNA
tacctttgccaagtgttccagccaccggcccag

SEQ ID NO: 11326 - RNA, 34 nt, synthetic construct
  source 1..34: mol_type = other RNA
ttacctttgccaagtgttccagccaccggcccag

SEQ ID NO: 11327 - RNA, 35 nt, synthetic construct
  source 1..35: mol_type = other RNA
gttacctttgccaagtgttccagccaccggcccag

SEQ ID NO: 11328 - RNA, 36 nt, synthetic construct
  source 1..36: mol_type = other RNA
tgttacctttgccaagtgttccagccaccggcccag

SEQ ID NO: 11329 - RNA, 37 nt, synthetic construct
  source 1..37: mol_type = other RNA
ctgttacctttgccaagtgttccagccaccggcccag

SEQ ID NO: 11330 - RNA, 38 nt, synthetic construct
  source 1..38: mol_type = other RNA
gctgttacctttgccaagtgttccagccaccggcccag

SEQ ID NO: 11331 - RNA, 39 nt, synthetic construct
  source 1..39: mol_type = other RNA
tgctgttacctttgccaagtgttccagccaccggcccag

SEQ ID NO: 11332 - RNA, 40 nt, synthetic construct
  source 1..40: mol_type = other RNA
ctgctgttacctttgccaagtgttccagccaccggcccag

SEQ ID NO: 11333 - RNA, 41 nt, synthetic construct
  source 1..41: mol_type = other RNA
gctgctgttacctttgccaagtgttccagccaccggcccag

SEQ ID NO: 11334 - RNA, 42 nt, synthetic construct
  source 1..42: mol_type = other RNA
agctgctgttacctttgccaagtgttccagccaccggcccag

SEQ ID NO: 11335 - RNA, 43 nt, synthetic construct
  source 1..43: mol_type = other RNA
aagctgctgttacctttgccaagtgttccagccaccggcccag

SEQ ID NO: 11336 - RNA, 44 nt, synthetic construct
  source 1..44: mol_type = other RNA
gaagctgctgttacctttgccaagtgttccagccaccggcccag

SEQ ID NO: 11337 - RNA, 45 nt, synthetic construct
  source 1..45: mol_type = other RNA
tgaagctgctgttacctttgccaagtgttccagccaccggcccag

SEQ ID NO: 11338 - RNA, 46 nt, synthetic construct
  source 1..46: mol_type = other RNA
ctgaagctgctgttacctttgccaagtgttccagccaccggcccag

SEQ ID NO: 11339 - RNA, 47 nt, synthetic construct
  source 1..47: mol_type = other RNA
cctgaagctgctgttacctttgccaagtgttccagccaccggcccag

SEQ ID NO: 11340 - RNA, 48 nt, synthetic construct
  source 1..48: mol_type = other RNA
acctgaagctgctgttacctttgccaagtgttccagccaccggcccag

SEQ ID NO: 11341 - RNA, 49 nt, synthetic construct
  source 1..49: mol_type = other RNA
aacctgaagctgctgttacctttgccaagtgttccagccaccggcccag

SEQ ID NO: 11342 - RNA, 50 nt, synthetic construct
  source 1..50: mol_type = other RNA
gaacctgaagctgctgttacctttgccaagtgttccagccaccggcccag

SEQ ID NO: 11343 - RNA, 51 nt, synthetic construct
  source 1..51: mol_type = other RNA
tgaacctgaagctgctgttacctttgccaagtgttccagccaccggcccag

SEQ ID NO: 11344 - RNA, 52 nt, synthetic construct
  source 1..52: mol_type = other RNA
ctgaacctgaagctgctgttacctttgccaagtgttccagccaccggcccag

SEQ ID NO: 11345 - RNA, 53 nt, synthetic construct
  source 1..53: mol_type = other RNA
tctgaacctgaagctgctgttacctttgccaagtgttccagccaccggcccag

SEQ ID NO: 11346 - RNA, 54 nt, synthetic construct
  source 1..54: mol_type = other RNA
ttctgaacctgaagctgctgttacctttgccaagtgttccagccaccggcccag

SEQ ID NO: 11347 - RNA, 55 nt, synthetic construct
  source 1..55: mol_type = other RNA
tttctgaacctgaagctgctgttacctttgccaagtgttccagccaccggcccag

SEQ ID NO: 11348 - RNA, 56 nt, synthetic construct
  source 1..56: mol_type = other RNA
ttttctgaacctgaagctgctgttacctttgccaagtgttccagccaccggcccag

SEQ ID NO: 11349 - RNA, 57 nt, synthetic construct
  source 1..57: mol_type = other RNA
cttttctgaacctgaagctgctgttacctttgccaagtgttccagccaccggcccag

SEQ ID NO: 11350 - RNA, 58 nt, synthetic construct
  source 1..58: mol_type = other RNA
tcttttctgaacctgaagctgctgttacctttgccaagtgttccagccaccggcccag

SEQ ID NO: 11351 - RNA, 59 nt, synthetic construct
  source 1..59: mol_type = other RNA
ctcttttctgaacctgaagctgctgttacctttgccaagtgttccagccaccggcccag

SEQ ID NO: 11352 - RNA, 60 nt, synthetic construct
  source 1..60: mol_type = other RNA
gctcttttctgaacctgaagctgctgttacctttgccaagtgttccagccaccggcccag

SEQ ID NO: 11353 - RNA, 61 nt, synthetic construct
  source 1..61: mol_type = other RNA
agctcttttctgaacctgaagctgctgttacctttgccaagtgttccagccaccggcccag

SEQ ID NO: 11354 - RNA, 62 nt, synthetic construct
  source 1..62: mol_type = other RNA
cagctcttttctgaacctgaagctgctgttacctttgccaagtgttccagccaccggcccag

SEQ ID NO: 11355 - RNA, 63 nt, synthetic construct
  source 1..63: mol_type = other RNA
gcagctcttttctgaacctgaagctgctgttacctttgccaagtgttccagccaccggcccag

SEQ ID NO: 11356 - RNA, 64 nt, synthetic construct
  source 1..64: mol_type = other RNA
agcagctcttttctgaacctgaagctgctgttacctttgccaagtgttccagccaccggcccag

SEQ ID NO: 11357 - RNA, 65 nt, synthetic construct
  source 1..65: mol_type = other RNA
gagcagctcttttctgaacctgaagctgctgttacctttgccaagtgttccagccaccggcccag

SEQ ID NO: 11358 - RNA, 66 nt, synthetic construct
  source 1..66: mol_type = other RNA
ggagcagctcttttctgaacctgaagctgctgttacctttgccaagtgttccagccaccggcccag

SEQ ID NO: 11359 - RNA, 67 nt, synthetic construct
  source 1..67: mol_type = other RNA
aggagcagctcttttctgaacctgaagctgctgttacctttgccaagtgttccagccaccggcccag

SEQ ID NO: 11360 - RNA, 68 nt, synthetic construct
  source 1..68: mol_type = other RNA
aaggagcagctcttttctgaacctgaagctgctgttacctttgccaagtgttccagccaccggcccag

SEQ ID NO: 11361 - RNA, 69 nt, synthetic construct
  source 1..69: mol_type = other RNA
gaaggagcagctcttttctgaacctgaagctgctgttacctttgccaagtgttccagccaccggcccag

SEQ ID NO: 11362 - RNA, 70 nt, synthetic construct
  source 1..70: mol_type = other RNA
tgaaggagcagctcttttctgaacctgaagctgctgttacctttgccaagtgttccagccaccggcccag

SEQ ID NO: 11363 - RNA, 71 nt, synthetic construct
  source 1..71: mol_type = other RNA
ctgaaggagcagctcttttctgaacctgaagctgctgttacctttgccaagtgttccagccaccggcccag

SEQ ID NO: 11364 - RNA, 72 nt, synthetic construct
  source 1..72: mol_type = other RNA
actgaaggagcagctcttttctgaacctgaagctgctgttacctttgccaagtgttccagccaccggcccag

SEQ ID NO: 11365 - RNA, 73 nt, synthetic construct
  source 1..73: mol_type = other RNA
tactgaaggagcagctcttttctgaacctgaagctgctgttacctttgccaagtgttccagccaccggcccag

SEQ ID NO: 11366 - RNA, 74 nt, synthetic construct
  source 1..74: mol_type = other RNA
ttactgaaggagcagctcttttctgaacctgaagctgctgttacctttgccaagtgttccagccaccggcccag

SEQ ID NO: 11367 - RNA, 75 nt, synthetic construct
  source 1..75: mol_type = other RNA
tttactgaaggagcagctcttttctgaacctgaagctgctgttacctttgccaagtgttccagccaccggcccag

SEQ ID NO: 11368 - RNA, 76 nt, synthetic construct
  source 1..76: mol_type = other RNA
gtttactgaaggagcagctcttttctgaacctgaagctgctgttacctttgccaagtgttccagccaccggcccag

SEQ ID NO: 11369 - RNA, 77 nt, synthetic construct
  source 1..77: mol_type = other RNA
tgtttactgaaggagcagctcttttctgaacctgaagctgctgttacctttgccaagtgttccagccaccggcccag

SEQ ID NO: 11370 - RNA, 78 nt, synthetic construct
  source 1..78: mol_type = other RNA
ttgtttactgaaggagcagctcttttctgaacctgaagctgctgttacctttgccaagtgttccagccaccggcccag

SEQ ID NO: 11371 - RNA, 79 nt, synthetic construct
  source 1..79: mol_type = other RNA
tttgtttactgaaggagcagctcttttctgaacctgaagctgctgttacctttgccaagtgttccagccaccggcccag

SEQ ID NO: 11372 - RNA, 80 nt, synthetic construct
  source 1..80: mol_type = other RNA
atttgtttactgaaggagcagctcttttctgaacctgaagctgctgttacctttgccaagtgttccagccaccggcccag

SEQ ID NO: 11373 - RNA, 81 nt, synthetic construct
  source 1..81: mol_type = other RNA
gatttgtttactgaaggagcagctcttttctgaacctgaagctgctgttacctttgccaagtgttccagccaccggcccag

SEQ ID NO: 11374 - RNA, 82 nt, synthetic construct
  source 1..82: mol_type = other RNA
agatttgtttactgaaggagcagctcttttctgaacctgaagctgctgttacctttgccaagtgttccagccaccggcccag

SEQ ID NO: 11375 - RNA, 83 nt, synthetic construct
  source 1..83: mol_type = other RNA
gagatttgtttactgaaggagcagctcttttctgaacctgaagctgctgttacctttgccaagtgttccagccaccggcccag

SEQ ID NO: 11376 - RNA, 84 nt, synthetic construct
  source 1..84: mol_type = other RNA
tgagatttgtttactgaaggagcagctcttttctgaacctgaagctgctgttacctttgccaagtgttccagccaccggcccag

SEQ ID NO: 11377 - RNA, 85 nt, synthetic construct
  source 1..85: mol_type = other RNA
gtgagatttgtttactgaaggagcagctcttttctgaacctgaagctgctgttacctttgccaagtgttccagccaccggcccag

SEQ ID NO: 11378 - RNA, 86 nt, synthetic construct
  source 1..86: mol_type = other RNA
agtgagatttgtttactgaaggagcagctcttttctgaacctgaagctgctgttacctttgccaagtgttccagccaccggcccag

SEQ ID NO: 11379 - RNA, 87 nt, synthetic construct
  source 1..87: mol_type = other RNA
aagtgagatttgtttactgaaggagcagctcttttctgaacctgaagctgctgttacctttgccaagtgttccagccaccggcccag

SEQ ID NO: 11380 - RNA, 88 nt, synthetic construct
  source 1..88: mol_type = other RNA
gaagtgagatttgtttactgaaggagcagctcttttctgaacctgaagctgctgttacctttgccaagtgttccagccaccggcccag

SEQ ID NO: 11381 - RNA, 89 nt, synthetic construct
  source 1..89: mol_type = other RNA
ggaagtgagatttgtttactgaaggagcagctcttttctgaacctgaagctgctgttacctttgccaagtgttccagccaccggcccag

SEQ ID NO: 11382 - RNA, 90 nt, synthetic construct
  source 1..90: mol_type = other RNA
aggaagtgagatttgtttactgaaggagcagctcttttctgaacctgaagctgctgttacctttgccaagtgttccagccaccggcccag

SEQ ID NO: 11383 - RNA, 91 nt, synthetic construct
  source 1..91: mol_type = other RNA
gaggaagtgagatttgtttactgaaggagcagctcttttctgaacctgaagctgctgttacctttgccaagtgttccagccaccggcccag

SEQ ID NO: 11384 - RNA, 92 nt, synthetic construct
  source 1..92: mol_type = other RNA
agaggaagtgagatttgtttactgaaggagcagctcttttctgaacctgaagctgctgttacctttgccaagtgttccagccaccggcccag

SEQ ID NO: 11385 - RNA, 93 nt, synthetic construct
  source 1..93: mol_type = other RNA
cagaggaagtgagatttgtttactgaaggagcagctcttttctgaacctgaagctgctgttacctttgccaagtgttccagccaccggcccag

SEQ ID NO: 11386 - RNA, 94 nt, synthetic construct
  source 1..94: mol_type = other RNA
tcagaggaagtgagatttgtttactgaaggagcagctcttttctgaacctgaagctgctgttacctttgccaagtgttccagccaccggcccag

SEQ ID NO: 11387 - RNA, 95 nt, synthetic construct
  source 1..95: mol_type = other RNA
ttcagaggaagtgagatttgtttactgaaggagcagctcttttctgaacctgaagctgctgttacctttgccaagtgttccagccaccggcccag

SEQ ID NO: 11388 - RNA, 96 nt, synthetic construct
  source 1..96: mol_type = other RNA
gttcagaggaagtgagatttgtttactgaaggagcagctcttttctgaacctgaagctgctgttacctttgccaagtgttccagccaccggcccag

SEQ ID NO: 11389 - RNA, 97 nt, synthetic construct
  source 1..97: mol_type = other RNA
tgttcagaggaagtgagatttgtttactgaaggagcagctcttttctgaacctgaagctgctgttacctttgccaagtgttccagccaccggcccag

SEQ ID NO: 11390 - RNA, 98 nt, synthetic construct
  source 1..98: mol_type = other RNA
gtgttcagaggaagtgagatttgtttactgaaggagcagctcttttctgaacctgaagctgctgttacctttgccaagtgttccagccaccggcccag

SEQ ID NO: 11391 - RNA, 99 nt, synthetic construct
  source 1..99: mol_type = other RNA
ggtgttcagaggaagtgagatttgtttactgaaggagcagctcttttctgaacctgaagctgctgttacctttgccaagtgttccagccaccggcccag

SEQ ID NO: 11392 - RNA, 100 nt, synthetic construct
  source 1..100: mol_type = other RNA
tggtgttcagaggaagtgagatttgtttactgaaggagcagctcttttctgaacctgaagctgctgttacctttgccaagtgttccagccaccggcccag

SEQ ID NO: 11393 - RNA, 16 nt, synthetic construct
  source 1..16: mol_type = other RNA
ttcattgccctgggcc

SEQ ID NO: 11394 - RNA, 17 nt, synthetic construct
  source 1..17: mol_type = other RNA
gttcattgccctgggcc

SEQ ID NO: 11395 - RNA, 18 nt, synthetic construct
  source 1..18: mol_type = other RNA
tgttcattgccctgggcc

SEQ ID NO: 11396 - RNA, 19 nt, synthetic construct
  source 1..19: mol_type = other RNA
gtgttcattgccctgggcc

SEQ ID NO: 11397 - RNA, 20 nt, synthetic construct
  source 1..20: mol_type = other RNA
tgtgttcattgccctgggcc

SEQ ID NO: 11398 - RNA, 21 nt, synthetic construct
  source 1..21: mol_type = other RNA
ttgtgttcattgccctgggcc

SEQ ID NO: 11399 - RNA, 22 nt, synthetic construct
  source 1..22: mol_type = other RNA
tttgtgttcattgccctgggcc

SEQ ID NO: 11400-11405 - skipped (6 entries)

SEQ ID NO: 11406 - RNA, 10 nt, synthetic construct
  source 1..10: mol_type = other RNA
ccagggcaat

SEQ ID NO: 11407 - RNA, 11 nt, synthetic construct
  source 1..11: mol_type = other RNA
ccagggcaatg

SEQ ID NO: 11408 - RNA, 12 nt, synthetic construct
  source 1..12: mol_type = other RNA
ccagggcaatga

SEQ ID NO: 11409 - RNA, 13 nt, synthetic construct
  source 1..13: mol_type = other RNA
ccagggcaatgaa

SEQ ID NO: 11410 - RNA, 14 nt, synthetic construct
  source 1..14: mol_type = other RNA
ccagggcaatgaac

SEQ ID NO: 11411 - RNA, 15 nt, synthetic construct
  source 1..15: mol_type = other RNA
ccagggcaatgaaca

SEQ ID NO: 11412 - RNA, 16 nt, synthetic construct
  source 1..16: mol_type = other RNA
ccagggcaatgaacac

SEQ ID NO: 11413 - RNA, 17 nt, synthetic construct
  source 1..17: mol_type = other RNA
ccagggcaatgaacaca

SEQ ID NO: 11414 - RNA, 18 nt, synthetic construct
  source 1..18: mol_type = other RNA
ccagggcaatgaacacaa

SEQ ID NO: 11415 - RNA, 19 nt, synthetic construct
  source 1..19: mol_type = other RNA
ccagggcaatgaacacaaa

SEQ ID NO: 11416 - RNA, 10 nt, synthetic construct
  source 1..10: mol_type = other RNA
agccaacggc

SEQ ID NO: 11417 - RNA, 10 nt, synthetic construct
  source 1..10: mol_type = other RNA
agccatcggc

SEQ ID NO: 11418 - RNA, 10 nt, synthetic construct
  source 1..10: mol_type = other RNA
agccaccggc

SEQ ID NO: 11419 - RNA, 10 nt, synthetic construct
  source 1..10: mol_type = other RNA
agccagcggc

SEQ ID NO: 11420 - RNA, 10 nt, synthetic construct
  source 1..10: mol_type = other RNA
agccatctgc

SEQ ID NO: 11421 - RNA, 11 nt, synthetic construct
  source 1..11: mol_type = other RNA
cagccatctgc

SEQ ID NO: 11422 - RNA, 11 nt, synthetic construct
  source 1..11: mol_type = other RNA
cagccaccggc

SEQ ID NO: 11423 - RNA, 11 nt, synthetic construct
  source 1..11: mol_type = other RNA
cagccaacggc

SEQ ID NO: 11424 - RNA, 11 nt, synthetic construct
  source 1..11: mol_type = other RNA
cagccatcggc

SEQ ID NO: 11425 - RNA, 11 nt, synthetic construct
  source 1..11: mol_type = other RNA
cagccagcggc

SEQ ID NO: 11426 - RNA, 12 nt, synthetic construct
  source 1..12: mol_type = other RNA
ccagccatctgc

SEQ ID NO: 11427 - RNA, 12 nt, synthetic construct
  source 1..12: mol_type = other RNA
ccagccaccggc

SEQ ID NO: 11428 - RNA, 12 nt, synthetic construct
  source 1..12: mol_type = other RNA
ccagccagcggc

SEQ ID NO: 11429 - RNA, 12 nt, synthetic construct
  source 1..12: mol_type = other RNA
ccagccatcggc

SEQ ID NO: 11430 - RNA, 12 nt, synthetic construct
  source 1..12: mol_type = other RNA
ccagccaacggc

SEQ ID NO: 11431 - RNA, 13 nt, synthetic construct
  source 1..13: mol_type = other RNA
tccagccatctgc

SEQ ID NO: 11432 - RNA, 13 nt, synthetic construct
  source 1..13: mol_type = other RNA
tccagccagcggc

SEQ ID NO: 11433 - RNA, 13 nt, synthetic construct
  source 1..13: mol_type = other RNA
tccagccatcggc

SEQ ID NO: 11434 - RNA, 13 nt, synthetic construct
  source 1..13: mol_type = other RNA
tccagccaacggc

SEQ ID NO: 11435 - RNA, 13 nt, synthetic construct
  source 1..13: mol_type = other RNA
tccagccaccggc

SEQ ID NO: 11436 - RNA, 14 nt, synthetic construct
  source 1..14: mol_type = other RNA
ttccagccatctgc

SEQ ID NO: 11437 - RNA, 14 nt, synthetic construct
  source 1..14: mol_type = other RNA
ttccagccatcggc

SEQ ID NO: 11438 - RNA, 14 nt, synthetic construct
  source 1..14: mol_type = other RNA
ttccagccaacggc

SEQ ID NO: 11439 - RNA, 14 nt, synthetic construct
  source 1..14: mol_type = other RNA
ttccagccagcggc

SEQ ID NO: 11440 - RNA, 14 nt, synthetic construct
  source 1..14: mol_type = other RNA
ttccagccaccggc

SEQ ID NO: 11441 - RNA, 15 nt, synthetic construct
  source 1..15: mol_type = other RNA
gttccagccagcggc

SEQ ID NO: 11442 - RNA, 15 nt, synthetic construct
  source 1..15: mol_type = other RNA
gttccagccatcggc

SEQ ID NO: 11443 - RNA, 15 nt, synthetic construct
  source 1..15: mol_type = other RNA
gttccagccaccggc

SEQ ID NO: 11444 - RNA, 15 nt, synthetic construct
  source 1..15: mol_type = other RNA
gttccagccaacggc

SEQ ID NO: 11445 - RNA, 15 nt, synthetic construct
  source 1..15: mol_type = other RNA
gttccagccatctgc

SEQ ID NO: 11446 - RNA, 16 nt, synthetic construct
  source 1..16: mol_type = other RNA
tgttccagccatcggc

SEQ ID NO: 11447 - RNA, 16 nt, synthetic construct
  source 1..16: mol_type = other RNA
tgttccagccaccggc

SEQ ID NO: 11448 - RNA, 16 nt, synthetic construct
  source 1..16: mol_type = other RNA
tgttccagccagcggc

SEQ ID NO: 11449 - RNA, 16 nt, synthetic construct
  source 1..16: mol_type = other RNA
tgttccagccaacggc

SEQ ID NO: 11450 - RNA, 16 nt, synthetic construct
  source 1..16: mol_type = other RNA
tgttccagccatctgc

SEQ ID NO: 11451 - RNA, 17 nt, synthetic construct
  source 1..17: mol_type = other RNA
gtgttccagccatctgc

SEQ ID NO: 11452 - RNA, 17 nt, synthetic construct
  source 1..17: mol_type = other RNA
gtgttccagccaacggc

SEQ ID NO: 11453 - RNA, 17 nt, synthetic construct
  source 1..17: mol_type = other RNA
gtgttccagccatcggc

SEQ ID NO: 11454 - RNA, 17 nt, synthetic construct
  source 1..17: mol_type = other RNA
gtgttccagccaccggc

SEQ ID NO: 11455 - RNA, 17 nt, synthetic construct
  source 1..17: mol_type = other RNA
gtgttccagccagcggc

SEQ ID NO: 11456 - RNA, 18 nt, synthetic construct
  source 1..18: mol_type = other RNA
agtgttccagccatcggc

SEQ ID NO: 11457 - RNA, 18 nt, synthetic construct
  source 1..18: mol_type = other RNA
agtgttccagccaccggc

SEQ ID NO: 11458 - RNA, 18 nt, synthetic construct
  source 1..18: mol_type = other RNA
agtgttccagccagcggc

SEQ ID NO: 11459 - RNA, 18 nt, synthetic construct
  source 1..18: mol_type = other RNA
agtgttccagccaacggc

SEQ ID NO: 11460 - RNA, 18 nt, synthetic construct
  source 1..18: mol_type = other RNA
agtgttccagccatctgc

SEQ ID NO: 11461 - RNA, 19 nt, synthetic construct
  source 1..19: mol_type = other RNA
aagtgttccagccatctgc

SEQ ID NO: 11462 - RNA, 19 nt, synthetic construct
  source 1..19: mol_type = other RNA
aagtgttccagccaacggc

SEQ ID NO: 11463 - RNA, 19 nt, synthetic construct
  source 1..19: mol_type = other RNA
aagtgttccagccatcggc

SEQ ID NO: 11464 - RNA, 19 nt, synthetic construct
  source 1..19: mol_type = other RNA
aagtgttccagccagcggc

SEQ ID NO: 11465 - RNA, 19 nt, synthetic construct
  source 1..19: mol_type = other RNA
aagtgttccagccaccggc

SEQ ID NO: 11466 - RNA, 20 nt, synthetic construct
  source 1..20: mol_type = other RNA
caagtgttccagccagcggc

SEQ ID NO: 11467 - RNA, 20 nt, synthetic construct
  source 1..20: mol_type = other RNA
caagtgttccagccatctgc

SEQ ID NO: 11468 - RNA, 20 nt, synthetic construct
  source 1..20: mol_type = other RNA
caagtgttccagccaacggc

SEQ ID NO: 11469 - RNA, 20 nt, synthetic construct
  source 1..20: mol_type = other RNA
caagtgttccagccaccggc

SEQ ID NO: 11470 - RNA, 20 nt, synthetic construct
  source 1..20: mol_type = other RNA
caagtgttccagccatcggc

SEQ ID NO: 11471 - RNA, 21 nt, synthetic construct
  source 1..21: mol_type = other RNA
ccaagtgttccagccaccggc

SEQ ID NO: 11472 - RNA, 21 nt, synthetic construct
  source 1..21: mol_type = other RNA
ccaagtgttccagccatctgc

SEQ ID NO: 11473 - RNA, 21 nt, synthetic construct
  source 1..21: mol_type = other RNA
ccaagtgttccagccaacggc

SEQ ID NO: 11474 - RNA, 21 nt, synthetic construct
  source 1..21: mol_type = other RNA
ccaagtgttccagccagcggc

SEQ ID NO: 11475 - RNA, 21 nt, synthetic construct
  source 1..21: mol_type = other RNA
ccaagtgttccagccatcggc

SEQ ID NO: 11476 - RNA, 22 nt, synthetic construct
  source 1..22: mol_type = other RNA
gccaagtgttccagccatcggc

SEQ ID NO: 11477 - RNA, 22 nt, synthetic construct
  source 1..22: mol_type = other RNA
gccaagtgttccagccaccggc

SEQ ID NO: 11478 - RNA, 22 nt, synthetic construct
  source 1..22: mol_type = other RNA
gccaagtgttccagccatctgc

SEQ ID NO: 11479 - RNA, 22 nt, synthetic construct
  source 1..22: mol_type = other RNA
gccaagtgttccagccaacggc

SEQ ID NO: 11480 - RNA, 22 nt, synthetic construct
  source 1..22: mol_type = other RNA
gccaagtgttccagccagcggc

SEQ ID NO: 11481 - RNA, 23 nt, synthetic construct
  source 1..23: mol_type = other RNA
tgccaagtgttccagccatcggc

SEQ ID NO: 11482 - RNA, 23 nt, synthetic construct
  source 1..23: mol_type = other RNA
tgccaagtgttccagccaacggc

SEQ ID NO: 11483 - RNA, 23 nt, synthetic construct
  source 1..23: mol_type = other RNA
tgccaagtgttccagccatctgc

SEQ ID NO: 11484 - RNA, 23 nt, synthetic construct
  source 1..23: mol_type = other RNA
tgccaagtgttccagccaccggc

SEQ ID NO: 11485 - RNA, 23 nt, synthetic construct
  source 1..23: mol_type = other RNA
tgccaagtgttccagccagcggc

SEQ ID NO: 11486 - RNA, 24 nt, synthetic construct
  source 1..24: mol_type = other RNA
ttgccaagtgttccagccatctgc

SEQ ID NO: 11487 - RNA, 24 nt, synthetic construct
  source 1..24: mol_type = other RNA
ttgccaagtgttccagccatcggc

SEQ ID NO: 11488 - RNA, 24 nt, synthetic construct
  source 1..24: mol_type = other RNA
ttgccaagtgttccagccaccggc

SEQ ID NO: 11489 - RNA, 24 nt, synthetic construct
  source 1..24: mol_type = other RNA
ttgccaagtgttccagccaacggc

SEQ ID NO: 11490 - RNA, 24 nt, synthetic construct
  source 1..24: mol_type = other RNA
ttgccaagtgttccagccagcggc

SEQ ID NO: 11491 - RNA, 25 nt, synthetic construct
  source 1..25: mol_type = other RNA
tttgccaagtgttccagccaccggc

SEQ ID NO: 11492 - RNA, 25 nt, synthetic construct
  source 1..25: mol_type = other RNA
tttgccaagtgttccagccatctgc

SEQ ID NO: 11493 - RNA, 25 nt, synthetic construct
  source 1..25: mol_type = other RNA
tttgccaagtgttccagccaacggc

SEQ ID NO: 11494 - RNA, 25 nt, synthetic construct
  source 1..25: mol_type = other RNA
tttgccaagtgttccagccagcggc

SEQ ID NO: 11495 - RNA, 25 nt, synthetic construct
  source 1..25: mol_type = other RNA
tttgccaagtgttccagccatcggc

SEQ ID NO: 11496 - RNA, 26 nt, synthetic construct
  source 1..26: mol_type = other RNA
ctttgccaagtgttccagccagcggc

SEQ ID NO: 11497 - RNA, 26 nt, synthetic construct
  source 1..26: mol_type = other RNA
ctttgccaagtgttccagccatcggc

SEQ ID NO: 11498 - RNA, 26 nt, synthetic construct
  source 1..26: mol_type = other RNA
ctttgccaagtgttccagccaccggc

SEQ ID NO: 11499 - RNA, 26 nt, synthetic construct
  source 1..26: mol_type = other RNA
ctttgccaagtgttccagccatctgc

SEQ ID NO: 11500 - RNA, 26 nt, synthetic construct
  source 1..26: mol_type = other RNA
ctttgccaagtgttccagccaacggc

SEQ ID NO: 11501 - RNA, 27 nt, synthetic construct
  source 1..27: mol_type = other RNA
cctttgccaagtgttccagccatcggc

SEQ ID NO: 11502 - RNA, 27 nt, synthetic construct
  source 1..27: mol_type = other RNA
cctttgccaagtgttccagccatctgc

SEQ ID NO: 11503 - RNA, 27 nt, synthetic construct
  source 1..27: mol_type = other RNA
cctttgccaagtgttccagccaccggc

SEQ ID NO: 11504 - RNA, 27 nt, synthetic construct
  source 1..27: mol_type = other RNA
cctttgccaagtgttccagccagcggc

SEQ ID NO: 11505 - RNA, 27 nt, synthetic construct
  source 1..27: mol_type = other RNA
cctttgccaagtgttccagccaacggc

SEQ ID NO: 11506 - RNA, 28 nt, synthetic construct
  source 1..28: mol_type = other RNA
acctttgccaagtgttccagccatctgc

SEQ ID NO: 11507 - RNA, 28 nt, synthetic construct
  source 1..28: mol_type = other RNA
acctttgccaagtgttccagccaacggc

SEQ ID NO: 11508 - RNA, 28 nt, synthetic construct
  source 1..28: mol_type = other RNA
acctttgccaagtgttccagccaccggc

SEQ ID NO: 11509 - RNA, 28 nt, synthetic construct
  source 1..28: mol_type = other RNA
acctttgccaagtgttccagccagcggc

SEQ ID NO: 11510 - RNA, 28 nt, synthetic construct
  source 1..28: mol_type = other RNA
acctttgccaagtgttccagccatcggc

SEQ ID NO: 11511 - RNA, 29 nt, synthetic construct
  source 1..29: mol_type = other RNA
tacctttgccaagtgttccagccaacggc

SEQ ID NO: 11512 - RNA, 29 nt, synthetic construct
  source 1..29: mol_type = other RNA
tacctttgccaagtgttccagccatcggc

SEQ ID NO: 11513 - RNA, 29 nt, synthetic construct
  source 1..29: mol_type = other RNA
tacctttgccaagtgttccagccagcggc

SEQ ID NO: 11514 - RNA, 29 nt, synthetic construct
  source 1..29: mol_type = other RNA
tacctttgccaagtgttccagccaccggc

SEQ ID NO: 11515 - RNA, 29 nt, synthetic construct
  source 1..29: mol_type = other RNA
tacctttgccaagtgttccagccatctgc

SEQ ID NO: 11516 - RNA, 30 nt, synthetic construct
  source 1..30: mol_type = other RNA
ttacctttgccaagtgttccagccaccggc

SEQ ID NO: 11517 - RNA, 30 nt, synthetic construct
  source 1..30: mol_type = other RNA
ttacctttgccaagtgttccagccaacggc

SEQ ID NO: 11518 - RNA, 30 nt, synthetic construct
  source 1..30: mol_type = other RNA
ttacctttgccaagtgttccagccatctgc

SEQ ID NO: 11519 - RNA, 30 nt, synthetic construct
  source 1..30: mol_type = other RNA
ttacctttgccaagtgttccagccatcggc

SEQ ID NO: 11520 - RNA, 30 nt, synthetic construct
  source 1..30: mol_type = other RNA
ttacctttgccaagtgttccagccagcggc

SEQ ID NO: 11521 - RNA, 31 nt, synthetic construct
  source 1..31: mol_type = other RNA
gttacctttgccaagtgttccagccaccggc

SEQ ID NO: 11522 - RNA, 31 nt, synthetic construct
  source 1..31: mol_type = other RNA
gttacctttgccaagtgttccagccaacggc

SEQ ID NO: 11523 - RNA, 31 nt, synthetic construct
  source 1..31: mol_type = other RNA
gttacctttgccaagtgttccagccagcggc

SEQ ID NO: 11524 - RNA, 31 nt, synthetic construct
  source 1..31: mol_type = other RNA
gttacctttgccaagtgttccagccatcggc

SEQ ID NO: 11525 - RNA, 31 nt, synthetic construct
  source 1..31: mol_type = other RNA
gttacctttgccaagtgttccagccatctgc

SEQ ID NO: 11526 - RNA, 32 nt, synthetic construct
  source 1..32: mol_type = other RNA
tgttacctttgccaagtgttccagccaccggc

SEQ ID NO: 11527 - RNA, 32 nt, synthetic construct
  source 1..32: mol_type = other RNA
tgttacctttgccaagtgttccagccaacggc

SEQ ID NO: 11528 - RNA, 32 nt, synthetic construct
  source 1..32: mol_type = other RNA
tgttacctttgccaagtgttccagccatctgc

SEQ ID NO: 11529 - RNA, 32 nt, synthetic construct
  source 1..32: mol_type = other RNA
tgttacctttgccaagtgttccagccatcggc

SEQ ID NO: 11530 - RNA, 32 nt, synthetic construct
  source 1..32: mol_type = other RNA
tgttacctttgccaagtgttccagccagcggc

SEQ ID NO: 11531 - RNA, 33 nt, synthetic construct
  source 1..33: mol_type = other RNA
ctgttacctttgccaagtgttccagccatctgc

SEQ ID NO: 11532 - RNA, 33 nt, synthetic construct
  source 1..33: mol_type = other RNA
ctgttacctttgccaagtgttccagccatcggc

SEQ ID NO: 11533 - RNA, 33 nt, synthetic construct
  source 1..33: mol_type = other RNA
ctgttacctttgccaagtgttccagccaacggc

SEQ ID NO: 11534 - RNA, 33 nt, synthetic construct
  source 1..33: mol_type = other RNA
ctgttacctttgccaagtgttccagccagcggc

SEQ ID NO: 11535 - RNA, 33 nt, synthetic construct
  source 1..33: mol_type = other RNA
ctgttacctttgccaagtgttccagccaccggc

SEQ ID NO: 11536 - RNA, 34 nt, synthetic construct
  source 1..34: mol_type = other RNA
gctgttacctttgccaagtgttccagccaccggc

SEQ ID NO: 11537 - RNA, 34 nt, synthetic construct
  source 1..34: mol_type = other RNA
gctgttacctttgccaagtgttccagccatcggc

SEQ ID NO: 11538 - RNA, 34 nt, synthetic construct
  source 1..34: mol_type = other RNA
gctgttacctttgccaagtgttccagccatctgc

SEQ ID NO: 11539 - RNA, 34 nt, synthetic construct
  source 1..34: mol_type = other RNA
gctgttacctttgccaagtgttccagccagcggc

SEQ ID NO: 11540 - RNA, 34 nt, synthetic construct
  source 1..34: mol_type = other RNA
gctgttacctttgccaagtgttccagccaacggc

SEQ ID NO: 11541 - RNA, 35 nt, synthetic construct
  source 1..35: mol_type = other RNA
tgctgttacctttgccaagtgttccagccatcggc

SEQ ID NO: 11542 - RNA, 35 nt, synthetic construct
  source 1..35: mol_type = other RNA
tgctgttacctttgccaagtgttccagccatctgc

SEQ ID NO: 11543 - RNA, 35 nt, synthetic construct
  source 1..35: mol_type = other RNA
tgctgttacctttgccaagtgttccagccaacggc

SEQ ID NO: 11544 - RNA, 35 nt, synthetic construct
  source 1..35: mol_type = other RNA
tgctgttacctttgccaagtgttccagccagcggc

SEQ ID NO: 11545 - RNA, 35 nt, synthetic construct
  source 1..35: mol_type = other RNA
tgctgttacctttgccaagtgttccagccaccggc

SEQ ID NO: 11546 - RNA, 36 nt, synthetic construct
  source 1..36: mol_type = other RNA
ctgctgttacctttgccaagtgttccagccaccggc

SEQ ID NO: 11547 - RNA, 36 nt, synthetic construct
  source 1..36: mol_type = other RNA
ctgctgttacctttgccaagtgttccagccagcggc

SEQ ID NO: 11548 - RNA, 36 nt, synthetic construct
  source 1..36: mol_type = other RNA
ctgctgttacctttgccaagtgttccagccatcggc

SEQ ID NO: 11549 - RNA, 36 nt, synthetic construct
  source 1..36: mol_type = other RNA
ctgctgttacctttgccaagtgttccagccatctgc

SEQ ID NO: 11550 - RNA, 36 nt, synthetic construct
  source 1..36: mol_type = other RNA
ctgctgttacctttgccaagtgttccagccaacggc

SEQ ID NO: 11551 - RNA, 37 nt, synthetic construct
  source 1..37: mol_type = other RNA
gctgctgttacctttgccaagtgttccagccatcggc

SEQ ID NO: 11552 - RNA, 37 nt, synthetic construct
  source 1..37: mol_type = other RNA
gctgctgttacctttgccaagtgttccagccatctgc

SEQ ID NO: 11553 - RNA, 37 nt, synthetic construct
  source 1..37: mol_type = other RNA
gctgctgttacctttgccaagtgttccagccaacggc

SEQ ID NO: 11554 - RNA, 37 nt, synthetic construct
  source 1..37: mol_type = other RNA
gctgctgttacctttgccaagtgttccagccaccggc

SEQ ID NO: 11555 - RNA, 37 nt, synthetic construct
  source 1..37: mol_type = other RNA
gctgctgttacctttgccaagtgttccagccagcggc

SEQ ID NO: 11556 - RNA, 38 nt, synthetic construct
  source 1..38: mol_type = other RNA
agctgctgttacctttgccaagtgttccagccagcggc

SEQ ID NO: 11557 - RNA, 38 nt, synthetic construct
  source 1..38: mol_type = other RNA
agctgctgttacctttgccaagtgttccagccatctgc

SEQ ID NO: 11558 - RNA, 38 nt, synthetic construct
  source 1..38: mol_type = other RNA
agctgctgttacctttgccaagtgttccagccaccggc

SEQ ID NO: 11559 - RNA, 38 nt, synthetic construct
  source 1..38: mol_type = other RNA
agctgctgttacctttgccaagtgttccagccaacggc

SEQ ID NO: 11560 - RNA, 38 nt, synthetic construct
  source 1..38: mol_type = other RNA
agctgctgttacctttgccaagtgttccagccatcggc

SEQ ID NO: 11561 - RNA, 39 nt, synthetic construct
  source 1..39: mol_type = other RNA
aagctgctgttacctttgccaagtgttccagccaacggc

SEQ ID NO: 11562 - RNA, 39 nt, synthetic construct
  source 1..39: mol_type = other RNA
aagctgctgttacctttgccaagtgttccagccatctgc

SEQ ID NO: 11563 - RNA, 39 nt, synthetic construct
  source 1..39: mol_type = other RNA
aagctgctgttacctttgccaagtgttccagccatcggc

SEQ ID NO: 11564 - RNA, 39 nt, synthetic construct
  source 1..39: mol_type = other RNA
aagctgctgttacctttgccaagtgttccagccagcggc

SEQ ID NO: 11565 - RNA, 39 nt, synthetic construct
  source 1..39: mol_type = other RNA
aagctgctgttacctttgccaagtgttccagccaccggc

SEQ ID NO: 11566 - RNA, 40 nt, synthetic construct
  source 1..40: mol_type = other RNA
gaagctgctgttacctttgccaagtgttccagccatctgc

SEQ ID NO: 11567 - RNA, 40 nt, synthetic construct
  source 1..40: mol_type = other RNA
gaagctgctgttacctttgccaagtgttccagccagcggc

SEQ ID NO: 11568 - RNA, 40 nt, synthetic construct
  source 1..40: mol_type = other RNA
gaagctgctgttacctttgccaagtgttccagccaccggc

SEQ ID NO: 11569 - RNA, 40 nt, synthetic construct
  source 1..40: mol_type = other RNA
gaagctgctgttacctttgccaagtgttccagccaacggc

SEQ ID NO: 11570 - RNA, 40 nt, synthetic construct
  source 1..40: mol_type = other RNA
gaagctgctgttacctttgccaagtgttccagccatcggc

SEQ ID NO: 11571 - RNA, 41 nt, synthetic construct
  source 1..41: mol_type = other RNA
tgaagctgctgttacctttgccaagtgttccagccaccggc

SEQ ID NO: 11572 - RNA, 41 nt, synthetic construct
  source 1..41: mol_type = other RNA
tgaagctgctgttacctttgccaagtgttccagccatctgc

SEQ ID NO: 11573 - RNA, 41 nt, synthetic construct
  source 1..41: mol_type = other RNA
tgaagctgctgttacctttgccaagtgttccagccaacggc

SEQ ID NO: 11574 - RNA, 41 nt, synthetic construct
  source 1..41: mol_type = other RNA
tgaagctgctgttacctttgccaagtgttccagccagcggc

SEQ ID NO: 11575 - RNA, 41 nt, synthetic construct
  source 1..41: mol_type = other RNA
tgaagctgctgttacctttgccaagtgttccagccatcggc

SEQ ID NO: 11576 - RNA, 42 nt, synthetic construct
  source 1..42: mol_type = other RNA
ctgaagctgctgttacctttgccaagtgttccagccatcggc

SEQ ID NO: 11577 - RNA, 42 nt, synthetic construct
  source 1..42: mol_type = other RNA
ctgaagctgctgttacctttgccaagtgttccagccaccggc

SEQ ID NO: 11578 - RNA, 42 nt, synthetic construct
  source 1..42: mol_type = other RNA
ctgaagctgctgttacctttgccaagtgttccagccagcggc

SEQ ID NO: 11579 - RNA, 42 nt, synthetic construct
  source 1..42: mol_type = other RNA
ctgaagctgctgttacctttgccaagtgttccagccatctgc

SEQ ID NO: 11580 - RNA, 42 nt, synthetic construct
  source 1..42: mol_type = other RNA
ctgaagctgctgttacctttgccaagtgttccagccaacggc

SEQ ID NO: 11581 - RNA, 43 nt, synthetic construct
  source 1..43: mol_type = other RNA
cctgaagctgctgttacctttgccaagtgttccagccatctgc

SEQ ID NO: 11582 - RNA, 43 nt, synthetic construct
  source 1..43: mol_type = other RNA
cctgaagctgctgttacctttgccaagtgttccagccatcggc

SEQ ID NO: 11583 - RNA, 43 nt, synthetic construct
  source 1..43: mol_type = other RNA
cctgaagctgctgttacctttgccaagtgttccagccaccggc

SEQ ID NO: 11584 - RNA, 43 nt, synthetic construct
  source 1..43: mol_type = other RNA
cctgaagctgctgttacctttgccaagtgttccagccaacggc

SEQ ID NO: 11585 - RNA, 43 nt, synthetic construct
  source 1..43: mol_type = other RNA
cctgaagctgctgttacctttgccaagtgttccagccagcggc

SEQ ID NO: 11586 - RNA, 44 nt, synthetic construct
  source 1..44: mol_type = other RNA
acctgaagctgctgttacctttgccaagtgttccagccatctgc

SEQ ID NO: 11587 - RNA, 44 nt, synthetic construct
  source 1..44: mol_type = other RNA
acctgaagctgctgttacctttgccaagtgttccagccaacggc

SEQ ID NO: 11588 - RNA, 44 nt, synthetic construct
  source 1..44: mol_type = other RNA
acctgaagctgctgttacctttgccaagtgttccagccatcggc

SEQ ID NO: 11589 - RNA, 44 nt, synthetic construct
  source 1..44: mol_type = other RNA
acctgaagctgctgttacctttgccaagtgttccagccagcggc

SEQ ID NO: 11590 - RNA, 44 nt, synthetic construct
  source 1..44: mol_type = other RNA
acctgaagctgctgttacctttgccaagtgttccagccaccggc

SEQ ID NO: 11591 - RNA, 45 nt, synthetic construct
  source 1..45: mol_type = other RNA
aacctgaagctgctgttacctttgccaagtgttccagccatcggc

SEQ ID NO: 11592 - RNA, 45 nt, synthetic construct
  source 1..45: mol_type = other RNA
aacctgaagctgctgttacctttgccaagtgttccagccatctgc

SEQ ID NO: 11593 - RNA, 45 nt, synthetic construct
  source 1..45: mol_type = other RNA
aacctgaagctgctgttacctttgccaagtgttccagccaacggc

SEQ ID NO: 11594 - RNA, 45 nt, synthetic construct
  source 1..45: mol_type = other RNA
aacctgaagctgctgttacctttgccaagtgttccagccagcggc

SEQ ID NO: 11595 - RNA, 45 nt, synthetic construct
  source 1..45: mol_type = other RNA
aacctgaagctgctgttacctttgccaagtgttccagccaccggc

SEQ ID NO: 11596 - RNA, 46 nt, synthetic construct
  source 1..46: mol_type = other RNA
gaacctgaagctgctgttacctttgccaagtgttccagccatctgc

SEQ ID NO: 11597 - RNA, 46 nt, synthetic construct
  source 1..46: mol_type = other RNA
gaacctgaagctgctgttacctttgccaagtgttccagccaacggc

SEQ ID NO: 11598 - RNA, 46 nt, synthetic construct
  source 1..46: mol_type = other RNA
gaacctgaagctgctgttacctttgccaagtgttccagccaccggc

SEQ ID NO: 11599 - RNA, 46 nt, synthetic construct
  source 1..46: mol_type = other RNA
gaacctgaagctgctgttacctttgccaagtgttccagccagcggc

SEQ ID NO: 11600 - RNA, 46 nt, synthetic construct
  source 1..46: mol_type = other RNA
gaacctgaagctgctgttacctttgccaagtgttccagccatcggc

SEQ ID NO: 11601 - RNA, 47 nt, synthetic construct
  source 1..47: mol_type = other RNA
tgaacctgaagctgctgttacctttgccaagtgttccagccaacggc

SEQ ID NO: 11602 - RNA, 47 nt, synthetic construct
  source 1..47: mol_type = other RNA
tgaacctgaagctgctgttacctttgccaagtgttccagccaccggc

SEQ ID NO: 11603 - RNA, 47 nt, synthetic construct
  source 1..47: mol_type = other RNA
tgaacctgaagctgctgttacctttgccaagtgttccagccatcggc

SEQ ID NO: 11604 - RNA, 47 nt, synthetic construct
  source 1..47: mol_type = other RNA
tgaacctgaagctgctgttacctttgccaagtgttccagccatctgc

SEQ ID NO: 11605 - RNA, 47 nt, synthetic construct
  source 1..47: mol_type = other RNA
tgaacctgaagctgctgttacctttgccaagtgttccagccagcggc

SEQ ID NO: 11606 - RNA, 48 nt, synthetic construct
  source 1..48: mol_type = other RNA
ctgaacctgaagctgctgttacctttgccaagtgttccagccaccggc

SEQ ID NO: 11607 - RNA, 48 nt, synthetic construct
  source 1..48: mol_type = other RNA
ctgaacctgaagctgctgttacctttgccaagtgttccagccaacggc

SEQ ID NO: 11608 - RNA, 48 nt, synthetic construct
  source 1..48: mol_type = other RNA
ctgaacctgaagctgctgttacctttgccaagtgttccagccagcggc

SEQ ID NO: 11609 - RNA, 48 nt, synthetic construct
  source 1..48: mol_type = other RNA
ctgaacctgaagctgctgttacctttgccaagtgttccagccatcggc

SEQ ID NO: 11610 - RNA, 48 nt, synthetic construct
  source 1..48: mol_type = other RNA
ctgaacctgaagctgctgttacctttgccaagtgttccagccatctgc

SEQ ID NO: 11611 - RNA, 49 nt, synthetic construct
  source 1..49: mol_type = other RNA
tctgaacctgaagctgctgttacctttgccaagtgttccagccatctgc

SEQ ID NO: 11612 - RNA, 49 nt, synthetic construct
  source 1..49: mol_type = other RNA
tctgaacctgaagctgctgttacctttgccaagtgttccagccaacggc

SEQ ID NO: 11613 - RNA, 49 nt, synthetic construct
  source 1..49: mol_type = other RNA
tctgaacctgaagctgctgttacctttgccaagtgttccagccagcggc

SEQ ID NO: 11614 - RNA, 49 nt, synthetic construct
  source 1..49: mol_type = other RNA
tctgaacctgaagctgctgttacctttgccaagtgttccagccatcggc

SEQ ID NO: 11615 - RNA, 49 nt, synthetic construct
  source 1..49: mol_type = other RNA
tctgaacctgaagctgctgttacctttgccaagtgttccagccaccggc

SEQ ID NO: 11616 - RNA, 50 nt, synthetic construct
  source 1..50: mol_type = other RNA
ttctgaacctgaagctgctgttacctttgccaagtgttccagccagcggc

SEQ ID NO: 11617 - RNA, 50 nt, synthetic construct
  source 1..50: mol_type = other RNA
ttctgaacctgaagctgctgttacctttgccaagtgttccagccatctgc

SEQ ID NO: 11618 - RNA, 50 nt, synthetic construct
  source 1..50: mol_type = other RNA
ttctgaacctgaagctgctgttacctttgccaagtgttccagccaacggc

SEQ ID NO: 11619 - RNA, 50 nt, synthetic construct
  source 1..50: mol_type = other RNA
ttctgaacctgaagctgctgttacctttgccaagtgttccagccaccggc

SEQ ID NO: 11620 - RNA, 50 nt, synthetic construct
  source 1..50: mol_type = other RNA
ttctgaacctgaagctgctgttacctttgccaagtgttccagccatcggc

SEQ ID NO: 11621 - RNA, 51 nt, synthetic construct
  source 1..51: mol_type = other RNA
tttctgaacctgaagctgctgttacctttgccaagtgttccagccatctgc

SEQ ID NO: 11622 - RNA, 51 nt, synthetic construct
  source 1..51: mol_type = other RNA
tttctgaacctgaagctgctgttacctttgccaagtgttccagccaacggc

SEQ ID NO: 11623 - RNA, 51 nt, synthetic construct
  source 1..51: mol_type = other RNA
tttctgaacctgaagctgctgttacctttgccaagtgttccagccatcggc

SEQ ID NO: 11624 - RNA, 51 nt, synthetic construct
  source 1..51: mol_type = other RNA
tttctgaacctgaagctgctgttacctttgccaagtgttccagccagcggc

SEQ ID NO: 11625 - RNA, 51 nt, synthetic construct
  source 1..51: mol_type = other RNA
tttctgaacctgaagctgctgttacctttgccaagtgttccagccaccggc

SEQ ID NO: 11626 - RNA, 52 nt, synthetic construct
  source 1..52: mol_type = other RNA
ttttctgaacctgaagctgctgttacctttgccaagtgttccagccaccggc

SEQ ID NO: 11627 - RNA, 52 nt, synthetic construct
  source 1..52: mol_type = other RNA
ttttctgaacctgaagctgctgttacctttgccaagtgttccagccaacggc

SEQ ID NO: 11628 - RNA, 52 nt, synthetic construct
  source 1..52: mol_type = other RNA
ttttctgaacctgaagctgctgttacctttgccaagtgttccagccagcggc

SEQ ID NO: 11629 - RNA, 52 nt, synthetic construct
  source 1..52: mol_type = other RNA
ttttctgaacctgaagctgctgttacctttgccaagtgttccagccatctgc

SEQ ID NO: 11630 - RNA, 52 nt, synthetic construct
  source 1..52: mol_type = other RNA
ttttctgaacctgaagctgctgttacctttgccaagtgttccagccatcggc

SEQ ID NO: 11631 - RNA, 53 nt, synthetic construct
  source 1..53: mol_type = other RNA
cttttctgaacctgaagctgctgttacctttgccaagtgttccagccatcggc

SEQ ID NO: 11632 - RNA, 53 nt, synthetic construct
  source 1..53: mol_type = other RNA
cttttctgaacctgaagctgctgttacctttgccaagtgttccagccatctgc

SEQ ID NO: 11633 - RNA, 53 nt, synthetic construct
  source 1..53: mol_type = other RNA
cttttctgaacctgaagctgctgttacctttgccaagtgttccagccaacggc

SEQ ID NO: 11634 - RNA, 53 nt, synthetic construct
  source 1..53: mol_type = other RNA
cttttctgaacctgaagctgctgttacctttgccaagtgttccagccaccggc

SEQ ID NO: 11635 - RNA, 53 nt, synthetic construct
  source 1..53: mol_type = other RNA
cttttctgaacctgaagctgctgttacctttgccaagtgttccagccagcggc

SEQ ID NO: 11636 - RNA, 54 nt, synthetic construct
  source 1..54: mol_type = other RNA
tcttttctgaacctgaagctgctgttacctttgccaagtgttccagccagcggc

SEQ ID NO: 11637 - RNA, 54 nt, synthetic construct
  source 1..54: mol_type = other RNA
tcttttctgaacctgaagctgctgttacctttgccaagtgttccagccaacggc

SEQ ID NO: 11638 - RNA, 54 nt, synthetic construct
  source 1..54: mol_type = other RNA
tcttttctgaacctgaagctgctgttacctttgccaagtgttccagccaccggc

SEQ ID NO: 11639 - RNA, 54 nt, synthetic construct
  source 1..54: mol_type = other RNA
tcttttctgaacctgaagctgctgttacctttgccaagtgttccagccatcggc

SEQ ID NO: 11640 - RNA, 54 nt, synthetic construct
  source 1..54: mol_type = other RNA
tcttttctgaacctgaagctgctgttacctttgccaagtgttccagccatctgc

SEQ ID NO: 11641 - RNA, 55 nt, synthetic construct
  source 1..55: mol_type = other RNA
ctcttttctgaacctgaagctgctgttacctttgccaagtgttccagccatcggc

SEQ ID NO: 11642 - RNA, 55 nt, synthetic construct
  source 1..55: mol_type = other RNA
ctcttttctgaacctgaagctgctgttacctttgccaagtgttccagccatctgc

SEQ ID NO: 11643 - RNA, 55 nt, synthetic construct
  source 1..55: mol_type = other RNA
ctcttttctgaacctgaagctgctgttacctttgccaagtgttccagccaacggc

SEQ ID NO: 11644 - RNA, 55 nt, synthetic construct
  source 1..55: mol_type = other RNA
ctcttttctgaacctgaagctgctgttacctttgccaagtgttccagccaccggc

SEQ ID NO: 11645 - RNA, 55 nt, synthetic construct
  source 1..55: mol_type = other RNA
ctcttttctgaacctgaagctgctgttacctttgccaagtgttccagccagcggc

SEQ ID NO: 11646 - RNA, 56 nt, synthetic construct
  source 1..56: mol_type = other RNA
gctcttttctgaacctgaagctgctgttacctttgccaagtgttccagccaacggc

SEQ ID NO: 11647 - RNA, 56 nt, synthetic construct
  source 1..56: mol_type = other RNA
gctcttttctgaacctgaagctgctgttacctttgccaagtgttccagccatcggc

SEQ ID NO: 11648 - RNA, 56 nt, synthetic construct
  source 1..56: mol_type = other RNA
gctcttttctgaacctgaagctgctgttacctttgccaagtgttccagccatctgc

SEQ ID NO: 11649 - RNA, 56 nt, synthetic construct
  source 1..56: mol_type = other RNA
gctcttttctgaacctgaagctgctgttacctttgccaagtgttccagccaccggc

SEQ ID NO: 11650 - RNA, 56 nt, synthetic construct
  source 1..56: mol_type = other RNA
gctcttttctgaacctgaagctgctgttacctttgccaagtgttccagccagcggc

SEQ ID NO: 11651 - RNA, 57 nt, synthetic construct
  source 1..57: mol_type = other RNA
agctcttttctgaacctgaagctgctgttacctttgccaagtgttccagccaccggc

SEQ ID NO: 11652 - RNA, 57 nt, synthetic construct
  source 1..57: mol_type = other RNA
agctcttttctgaacctgaagctgctgttacctttgccaagtgttccagccatctgc

SEQ ID NO: 11653 - RNA, 57 nt, synthetic construct
  source 1..57: mol_type = other RNA
agctcttttctgaacctgaagctgctgttacctttgccaagtgttccagccatcggc

SEQ ID NO: 11654 - RNA, 57 nt, synthetic construct
  source 1..57: mol_type = other RNA
agctcttttctgaacctgaagctgctgttacctttgccaagtgttccagccagcggc

SEQ ID NO: 11655 - RNA, 57 nt, synthetic construct
  source 1..57: mol_type = other RNA
agctcttttctgaacctgaagctgctgttacctttgccaagtgttccagccaacggc

SEQ ID NO: 11656 - RNA, 58 nt, synthetic construct
  source 1..58: mol_type = other RNA
cagctcttttctgaacctgaagctgctgttacctttgccaagtgttccagccaacggc

SEQ ID NO: 11657 - RNA, 58 nt, synthetic construct
  source 1..58: mol_type = other RNA
cagctcttttctgaacctgaagctgctgttacctttgccaagtgttccagccagcggc

SEQ ID NO: 11658 - RNA, 58 nt, synthetic construct
  source 1..58: mol_type = other RNA
cagctcttttctgaacctgaagctgctgttacctttgccaagtgttccagccatcggc

SEQ ID NO: 11659 - RNA, 58 nt, synthetic construct
  source 1..58: mol_type = other RNA
cagctcttttctgaacctgaagctgctgttacctttgccaagtgttccagccatctgc

SEQ ID NO: 11660 - RNA, 58 nt, synthetic construct
  source 1..58: mol_type = other RNA
cagctcttttctgaacctgaagctgctgttacctttgccaagtgttccagccaccggc

SEQ ID NO: 11661 - RNA, 59 nt, synthetic construct
  source 1..59: mol_type = other RNA
gcagctcttttctgaacctgaagctgctgttacctttgccaagtgttccagccaccggc

SEQ ID NO: 11662 - RNA, 59 nt, synthetic construct
  source 1..59: mol_type = other RNA
gcagctcttttctgaacctgaagctgctgttacctttgccaagtgttccagccagcggc

SEQ ID NO: 11663 - RNA, 59 nt, synthetic construct
  source 1..59: mol_type = other RNA
gcagctcttttctgaacctgaagctgctgttacctttgccaagtgttccagccatcggc

SEQ ID NO: 11664 - RNA, 59 nt, synthetic construct
  source 1..59: mol_type = other RNA
gcagctcttttctgaacctgaagctgctgttacctttgccaagtgttccagccatctgc

SEQ ID NO: 11665 - RNA, 59 nt, synthetic construct
  source 1..59: mol_type = other RNA
gcagctcttttctgaacctgaagctgctgttacctttgccaagtgttccagccaacggc

SEQ ID NO: 11666 - RNA, 60 nt, synthetic construct
  source 1..60: mol_type = other RNA
agcagctcttttctgaacctgaagctgctgttacctttgccaagtgttccagccagcggc

SEQ ID NO: 11667 - RNA, 60 nt, synthetic construct
  source 1..60: mol_type = other RNA
agcagctcttttctgaacctgaagctgctgttacctttgccaagtgttccagccaacggc

SEQ ID NO: 11668 - RNA, 60 nt, synthetic construct
  source 1..60: mol_type = other RNA
agcagctcttttctgaacctgaagctgctgttacctttgccaagtgttccagccatcggc

SEQ ID NO: 11669 - RNA, 60 nt, synthetic construct
  source 1..60: mol_type = other RNA
agcagctcttttctgaacctgaagctgctgttacctttgccaagtgttccagccaccggc

SEQ ID NO: 11670 - RNA, 60 nt, synthetic construct
  source 1..60: mol_type = other RNA
agcagctcttttctgaacctgaagctgctgttacctttgccaagtgttccagccatctgc

SEQ ID NO: 11671 - RNA, 61 nt, synthetic construct
  source 1..61: mol_type = other RNA
gagcagctcttttctgaacctgaagctgctgttacctttgccaagtgttccagccatctgc

SEQ ID NO: 11672 - RNA, 61 nt, synthetic construct
  source 1..61: mol_type = other RNA
gagcagctcttttctgaacctgaagctgctgttacctttgccaagtgttccagccaacggc

SEQ ID NO: 11673 - RNA, 61 nt, synthetic construct
  source 1..61: mol_type = other RNA
gagcagctcttttctgaacctgaagctgctgttacctttgccaagtgttccagccaccggc

SEQ ID NO: 11674 - RNA, 61 nt, synthetic construct
  source 1..61: mol_type = other RNA
gagcagctcttttctgaacctgaagctgctgttacctttgccaagtgttccagccatcggc

SEQ ID NO: 11675 - RNA, 61 nt, synthetic construct
  source 1..61: mol_type = other RNA
gagcagctcttttctgaacctgaagctgctgttacctttgccaagtgttccagccagcggc

SEQ ID NO: 11676 - RNA, 62 nt, synthetic construct
  source 1..62: mol_type = other RNA
ggagcagctcttttctgaacctgaagctgctgttacctttgccaagtgttccagccatcggc

SEQ ID NO: 11677 - RNA, 62 nt, synthetic construct
  source 1..62: mol_type = other RNA
ggagcagctcttttctgaacctgaagctgctgttacctttgccaagtgttccagccaccggc

SEQ ID NO: 11678 - RNA, 62 nt, synthetic construct
  source 1..62: mol_type = other RNA
ggagcagctcttttctgaacctgaagctgctgttacctttgccaagtgttccagccaacggc

SEQ ID NO: 11679 - RNA, 62 nt, synthetic construct
  source 1..62: mol_type = other RNA
ggagcagctcttttctgaacctgaagctgctgttacctttgccaagtgttccagccatctgc

SEQ ID NO: 11680 - RNA, 62 nt, synthetic construct
  source 1..62: mol_type = other RNA
ggagcagctcttttctgaacctgaagctgctgttacctttgccaagtgttccagccagcggc

SEQ ID NO: 11681 - RNA, 63 nt, synthetic construct
  source 1..63: mol_type = other RNA
aggagcagctcttttctgaacctgaagctgctgttacctttgccaagtgttccagccagcggc

SEQ ID NO: 11682 - RNA, 63 nt, synthetic construct
  source 1..63: mol_type = other RNA
aggagcagctcttttctgaacctgaagctgctgttacctttgccaagtgttccagccaacggc

SEQ ID NO: 11683 - RNA, 63 nt, synthetic construct
  source 1..63: mol_type = other RNA
aggagcagctcttttctgaacctgaagctgctgttacctttgccaagtgttccagccatctgc

SEQ ID NO: 11684 - RNA, 63 nt, synthetic construct
  source 1..63: mol_type = other RNA
aggagcagctcttttctgaacctgaagctgctgttacctttgccaagtgttccagccaccggc

SEQ ID NO: 11685 - RNA, 63 nt, synthetic construct
  source 1..63: mol_type = other RNA
aggagcagctcttttctgaacctgaagctgctgttacctttgccaagtgttccagccatcggc

SEQ ID NO: 11686 - RNA, 64 nt, synthetic construct
  source 1..64: mol_type = other RNA
aaggagcagctcttttctgaacctgaagctgctgttacctttgccaagtgttccagccatctgc

SEQ ID NO: 11687 - RNA, 64 nt, synthetic construct
  source 1..64: mol_type = other RNA
aaggagcagctcttttctgaacctgaagctgctgttacctttgccaagtgttccagccatcggc

SEQ ID NO: 11688 - RNA, 64 nt, synthetic construct
  source 1..64: mol_type = other RNA
aaggagcagctcttttctgaacctgaagctgctgttacctttgccaagtgttccagccagcggc

SEQ ID NO: 11689 - RNA, 64 nt, synthetic construct
  source 1..64: mol_type = other RNA
aaggagcagctcttttctgaacctgaagctgctgttacctttgccaagtgttccagccaccggc

SEQ ID NO: 11690 - RNA, 64 nt, synthetic construct
  source 1..64: mol_type = other RNA
aaggagcagctcttttctgaacctgaagctgctgttacctttgccaagtgttccagccaacggc

SEQ ID NO: 11691 - RNA, 65 nt, synthetic construct
  source 1..65: mol_type = other RNA
gaaggagcagctcttttctgaacctgaagctgctgttacctttgccaagtgttccagccaccggc

SEQ ID NO: 11692 - RNA, 65 nt, synthetic construct
  source 1..65: mol_type = other RNA
gaaggagcagctcttttctgaacctgaagctgctgttacctttgccaagtgttccagccagcggc

SEQ ID NO: 11693 - RNA, 65 nt, synthetic construct
  source 1..65: mol_type = other RNA
gaaggagcagctcttttctgaacctgaagctgctgttacctttgccaagtgttccagccaacggc

SEQ ID NO: 11694 - RNA, 65 nt, synthetic construct
  source 1..65: mol_type = other RNA
gaaggagcagctcttttctgaacctgaagctgctgttacctttgccaagtgttccagccatctgc

SEQ ID NO: 11695 - RNA, 65 nt, synthetic construct
  source 1..65: mol_type = other RNA
gaaggagcagctcttttctgaacctgaagctgctgttacctttgccaagtgttccagccatcggc

SEQ ID NO: 11696 - RNA, 66 nt, synthetic construct
  source 1..66: mol_type = other RNA
tgaaggagcagctcttttctgaacctgaagctgctgttacctttgccaagtgttccagccatcggc

SEQ ID NO: 11697 - RNA, 66 nt, synthetic construct
  source 1..66: mol_type = other RNA
tgaaggagcagctcttttctgaacctgaagctgctgttacctttgccaagtgttccagccagcggc

SEQ ID NO: 11698 - RNA, 66 nt, synthetic construct
  source 1..66: mol_type = other RNA
tgaaggagcagctcttttctgaacctgaagctgctgttacctttgccaagtgttccagccatctgc

SEQ ID NO: 11699 - RNA, 66 nt, synthetic construct
  source 1..66: mol_type = other RNA
tgaaggagcagctcttttctgaacctgaagctgctgttacctttgccaagtgttccagccaccggc

SEQ ID NO: 11700 - RNA, 66 nt, synthetic construct
  source 1..66: mol_type = other RNA
tgaaggagcagctcttttctgaacctgaagctgctgttacctttgccaagtgttccagccaacggc

SEQ ID NO: 11701 - RNA, 67 nt, synthetic construct
  source 1..67: mol_type = other RNA
ctgaaggagcagctcttttctgaacctgaagctgctgttacctttgccaagtgttccagccaacggc

SEQ ID NO: 11702 - RNA, 67 nt, synthetic construct
  source 1..67: mol_type = other RNA
ctgaaggagcagctcttttctgaacctgaagctgctgttacctttgccaagtgttccagccatcggc

SEQ ID NO: 11703 - RNA, 67 nt, synthetic construct
  source 1..67: mol_type = other RNA
ctgaaggagcagctcttttctgaacctgaagctgctgttacctttgccaagtgttccagccatctgc

SEQ ID NO: 11704 - RNA, 67 nt, synthetic construct
  source 1..67: mol_type = other RNA
ctgaaggagcagctcttttctgaacctgaagctgctgttacctttgccaagtgttccagccagcggc

SEQ ID NO: 11705 - RNA, 67 nt, synthetic construct
  source 1..67: mol_type = other RNA
ctgaaggagcagctcttttctgaacctgaagctgctgttacctttgccaagtgttccagccaccggc

SEQ ID NO: 11706 - RNA, 68 nt, synthetic construct
  source 1..68: mol_type = other RNA
actgaaggagcagctcttttctgaacctgaagctgctgttacctttgccaagtgttccagccaccggc

SEQ ID NO: 11707 - RNA, 68 nt, synthetic construct
  source 1..68: mol_type = other RNA
actgaaggagcagctcttttctgaacctgaagctgctgttacctttgccaagtgttccagccatcggc

SEQ ID NO: 11708 - RNA, 68 nt, synthetic construct
  source 1..68: mol_type = other RNA
actgaaggagcagctcttttctgaacctgaagctgctgttacctttgccaagtgttccagccatctgc

SEQ ID NO: 11709 - RNA, 68 nt, synthetic construct
  source 1..68: mol_type = other RNA
actgaaggagcagctcttttctgaacctgaagctgctgttacctttgccaagtgttccagccaacggc

SEQ ID NO: 11710 - RNA, 68 nt, synthetic construct
  source 1..68: mol_type = other RNA
actgaaggagcagctcttttctgaacctgaagctgctgttacctttgccaagtgttccagccagcggc

SEQ ID NO: 11711 - RNA, 69 nt, synthetic construct
  source 1..69: mol_type = other RNA
tactgaaggagcagctcttttctgaacctgaagctgctgttacctttgccaagtgttccagccaacggc

SEQ ID NO: 11712 - RNA, 69 nt, synthetic construct
  source 1..69: mol_type = other RNA
tactgaaggagcagctcttttctgaacctgaagctgctgttacctttgccaagtgttccagccagcggc

SEQ ID NO: 11713 - RNA, 69 nt, synthetic construct
  source 1..69: mol_type = other RNA
tactgaaggagcagctcttttctgaacctgaagctgctgttacctttgccaagtgttccagccatctgc

SEQ ID NO: 11714 - RNA, 69 nt, synthetic construct
  source 1..69: mol_type = other RNA
tactgaaggagcagctcttttctgaacctgaagctgctgttacctttgccaagtgttccagccaccggc

SEQ ID NO: 11715 - RNA, 69 nt, synthetic construct
  source 1..69: mol_type = other RNA
tactgaaggagcagctcttttctgaacctgaagctgctgttacctttgccaagtgttccagccatcggc

SEQ ID NO: 11716 - RNA, 70 nt, synthetic construct
  source 1..70: mol_type = other RNA
ttactgaaggagcagctcttttctgaacctgaagctgctgttacctttgccaagtgttccagccatctgc

SEQ ID NO: 11717 - RNA, 70 nt, synthetic construct
  source 1..70: mol_type = other RNA
ttactgaaggagcagctcttttctgaacctgaagctgctgttacctttgccaagtgttccagccatcggc

SEQ ID NO: 11718 - RNA, 70 nt, synthetic construct
  source 1..70: mol_type = other RNA
ttactgaaggagcagctcttttctgaacctgaagctgctgttacctttgccaagtgttccagccagcggc

SEQ ID NO: 11719 - RNA, 70 nt, synthetic construct
  source 1..70: mol_type = other RNA
ttactgaaggagcagctcttttctgaacctgaagctgctgttacctttgccaagtgttccagccaccggc

SEQ ID NO: 11720 - RNA, 70 nt, synthetic construct
  source 1..70: mol_type = other RNA
ttactgaaggagcagctcttttctgaacctgaagctgctgttacctttgccaagtgttccagccaacggc

SEQ ID NO: 11721 - RNA, 71 nt, synthetic construct
  source 1..71: mol_type = other RNA
tttactgaaggagcagctcttttctgaacctgaagctgctgttacctttgccaagtgttccagccaccggc

SEQ ID NO: 11722 - RNA, 71 nt, synthetic construct
  source 1..71: mol_type = other RNA
tttactgaaggagcagctcttttctgaacctgaagctgctgttacctttgccaagtgttccagccatcggc

SEQ ID NO: 11723 - RNA, 71 nt, synthetic construct
  source 1..71: mol_type = other RNA
tttactgaaggagcagctcttttctgaacctgaagctgctgttacctttgccaagtgttccagccagcggc

SEQ ID NO: 11724 - RNA, 71 nt, synthetic construct
  source 1..71: mol_type = other RNA
tttactgaaggagcagctcttttctgaacctgaagctgctgttacctttgccaagtgttccagccaacggc

SEQ ID NO: 11725 - RNA, 71 nt, synthetic construct
  source 1..71: mol_type = other RNA
tttactgaaggagcagctcttttctgaacctgaagctgctgttacctttgccaagtgttccagccatctgc

SEQ ID NO: 11726 - RNA, 72 nt, synthetic construct
  source 1..72: mol_type = other RNA
gtttactgaaggagcagctcttttctgaacctgaagctgctgttacctttgccaagtgttccagccagcggc

SEQ ID NO: 11727 - RNA, 72 nt, synthetic construct
  source 1..72: mol_type = other RNA
gtttactgaaggagcagctcttttctgaacctgaagctgctgttacctttgccaagtgttccagccaccggc

SEQ ID NO: 11728 - RNA, 72 nt, synthetic construct
  source 1..72: mol_type = other RNA
gtttactgaaggagcagctcttttctgaacctgaagctgctgttacctttgccaagtgttccagccatctgc

SEQ ID NO: 11729 - RNA, 72 nt, synthetic construct
  source 1..72: mol_type = other RNA
gtttactgaaggagcagctcttttctgaacctgaagctgctgttacctttgccaagtgttccagccatcggc

SEQ ID NO: 11730 - RNA, 72 nt, synthetic construct
  source 1..72: mol_type = other RNA
gtttactgaaggagcagctcttttctgaacctgaagctgctgttacctttgccaagtgttccagccaacggc

SEQ ID NO: 11731 - RNA, 73 nt, synthetic construct
  source 1..73: mol_type = other RNA
tgtttactgaaggagcagctcttttctgaacctgaagctgctgttacctttgccaagtgttccagccaacggc

SEQ ID NO: 11732 - RNA, 73 nt, synthetic construct
  source 1..73: mol_type = other RNA
tgtttactgaaggagcagctcttttctgaacctgaagctgctgttacctttgccaagtgttccagccatctgc

SEQ ID NO: 11733 - RNA, 73 nt, synthetic construct
  source 1..73: mol_type = other RNA
tgtttactgaaggagcagctcttttctgaacctgaagctgctgttacctttgccaagtgttccagccagcggc

SEQ ID NO: 11734 - RNA, 73 nt, synthetic construct
  source 1..73: mol_type = other RNA
tgtttactgaaggagcagctcttttctgaacctgaagctgctgttacctttgccaagtgttccagccatcggc

SEQ ID NO: 11735 - RNA, 73 nt, synthetic construct
  source 1..73: mol_type = other RNA
tgtttactgaaggagcagctcttttctgaacctgaagctgctgttacctttgccaagtgttccagccaccggc

SEQ ID NO: 11736 - RNA, 74 nt, synthetic construct
  source 1..74: mol_type = other RNA
ttgtttactgaaggagcagctcttttctgaacctgaagctgctgttacctttgccaagtgttccagccagcggc

SEQ ID NO: 11737 - RNA, 74 nt, synthetic construct
  source 1..74: mol_type = other RNA
ttgtttactgaaggagcagctcttttctgaacctgaagctgctgttacctttgccaagtgttccagccaacggc

SEQ ID NO: 11738 - RNA, 74 nt, synthetic construct
  source 1..74: mol_type = other RNA
ttgtttactgaaggagcagctcttttctgaacctgaagctgctgttacctttgccaagtgttccagccatctgc

SEQ ID NO: 11739 - RNA, 74 nt, synthetic construct
  source 1..74: mol_type = other RNA
ttgtttactgaaggagcagctcttttctgaacctgaagctgctgttacctttgccaagtgttccagccatcggc

SEQ ID NO: 11740 - RNA, 74 nt, synthetic construct
  source 1..74: mol_type = other RNA
ttgtttactgaaggagcagctcttttctgaacctgaagctgctgttacctttgccaagtgttccagccaccggc

SEQ ID NO: 11741 - RNA, 75 nt, synthetic construct
  source 1..75: mol_type = other RNA
tttgtttactgaaggagcagctcttttctgaacctgaagctgctgttacctttgccaagtgttccagccaccggc

SEQ ID NO: 11742 - RNA, 75 nt, synthetic construct
  source 1..75: mol_type = other RNA
tttgtttactgaaggagcagctcttttctgaacctgaagctgctgttacctttgccaagtgttccagccagcggc

SEQ ID NO: 11743 - RNA, 75 nt, synthetic construct
  source 1..75: mol_type = other RNA
tttgtttactgaaggagcagctcttttctgaacctgaagctgctgttacctttgccaagtgttccagccatctgc

SEQ ID NO: 11744 - RNA, 75 nt, synthetic construct
  source 1..75: mol_type = other RNA
tttgtttactgaaggagcagctcttttctgaacctgaagctgctgttacctttgccaagtgttccagccatcggc

SEQ ID NO: 11745 - RNA, 75 nt, synthetic construct
  source 1..75: mol_type = other RNA
tttgtttactgaaggagcagctcttttctgaacctgaagctgctgttacctttgccaagtgttccagccaacggc

SEQ ID NO: 11746 - RNA, 76 nt, synthetic construct
  source 1..76: mol_type = other RNA
atttgtttactgaaggagcagctcttttctgaacctgaagctgctgttacctttgccaagtgttccagccatctgc

SEQ ID NO: 11747 - RNA, 76 nt, synthetic construct
  source 1..76: mol_type = other RNA
atttgtttactgaaggagcagctcttttctgaacctgaagctgctgttacctttgccaagtgttccagccaacggc

SEQ ID NO: 11748 - RNA, 76 nt, synthetic construct
  source 1..76: mol_type = other RNA
atttgtttactgaaggagcagctcttttctgaacctgaagctgctgttacctttgccaagtgttccagccaccggc

SEQ ID NO: 11749 - RNA, 76 nt, synthetic construct
  source 1..76: mol_type = other RNA
atttgtttactgaaggagcagctcttttctgaacctgaagctgctgttacctttgccaagtgttccagccatcggc

SEQ ID NO: 11750 - RNA, 76 nt, synthetic construct
  source 1..76: mol_type = other RNA
atttgtttactgaaggagcagctcttttctgaacctgaagctgctgttacctttgccaagtgttccagccagcggc

SEQ ID NO: 11751 - RNA, 77 nt, synthetic construct
  source 1..77: mol_type = other RNA
gatttgtttactgaaggagcagctcttttctgaacctgaagctgctgttacctttgccaagtgttccagccaacggc

SEQ ID NO: 11752 - RNA, 77 nt, synthetic construct
  source 1..77: mol_type = other RNA
gatttgtttactgaaggagcagctcttttctgaacctgaagctgctgttacctttgccaagtgttccagccaccggc

SEQ ID NO: 11753 - RNA, 77 nt, synthetic construct
  source 1..77: mol_type = other RNA
gatttgtttactgaaggagcagctcttttctgaacctgaagctgctgttacctttgccaagtgttccagccatctgc

SEQ ID NO: 11754 - RNA, 77 nt, synthetic construct
  source 1..77: mol_type = other RNA
gatttgtttactgaaggagcagctcttttctgaacctgaagctgctgttacctttgccaagtgttccagccagcggc

SEQ ID NO: 11755 - RNA, 77 nt, synthetic construct
  source 1..77: mol_type = other RNA
gatttgtttactgaaggagcagctcttttctgaacctgaagctgctgttacctttgccaagtgttccagccatcggc

SEQ ID NO: 11756 - RNA, 78 nt, synthetic construct
  source 1..78: mol_type = other RNA
agatttgtttactgaaggagcagctcttttctgaacctgaagctgctgttacctttgccaagtgttccagccagcggc

SEQ ID NO: 11757 - RNA, 78 nt, synthetic construct
  source 1..78: mol_type = other RNA
agatttgtttactgaaggagcagctcttttctgaacctgaagctgctgttacctttgccaagtgttccagccaacggc

SEQ ID NO: 11758 - RNA, 78 nt, synthetic construct
  source 1..78: mol_type = other RNA
agatttgtttactgaaggagcagctcttttctgaacctgaagctgctgttacctttgccaagtgttccagccatcggc

SEQ ID NO: 11759 - RNA, 78 nt, synthetic construct
  source 1..78: mol_type = other RNA
agatttgtttactgaaggagcagctcttttctgaacctgaagctgctgttacctttgccaagtgttccagccatctgc

SEQ ID NO: 11760 - RNA, 78 nt, synthetic construct
  source 1..78: mol_type = other RNA
agatttgtttactgaaggagcagctcttttctgaacctgaagctgctgttacctttgccaagtgttccagccaccggc

SEQ ID NO: 11761 - RNA, 79 nt, synthetic construct
  source 1..79: mol_type = other RNA
gagatttgtttactgaaggagcagctcttttctgaacctgaagctgctgttacctttgccaagtgttccagccagcggc

SEQ ID NO: 11762 - RNA, 79 nt, synthetic construct
  source 1..79: mol_type = other RNA
gagatttgtttactgaaggagcagctcttttctgaacctgaagctgctgttacctttgccaagtgttccagccatctgc

SEQ ID NO: 11763 - RNA, 79 nt, synthetic construct
  source 1..79: mol_type = other RNA
gagatttgtttactgaaggagcagctcttttctgaacctgaagctgctgttacctttgccaagtgttccagccaacggc

SEQ ID NO: 11764 - RNA, 79 nt, synthetic construct
  source 1..79: mol_type = other RNA
gagatttgtttactgaaggagcagctcttttctgaacctgaagctgctgttacctttgccaagtgttccagccatcggc

SEQ ID NO: 11765 - RNA, 79 nt, synthetic construct
  source 1..79: mol_type = other RNA
gagatttgtttactgaaggagcagctcttttctgaacctgaagctgctgttacctttgccaagtgttccagccaccggc

SEQ ID NO: 11766 - RNA, 80 nt, synthetic construct
  source 1..80: mol_type = other RNA
tgagatttgtttactgaaggagcagctcttttctgaacctgaagctgctgttacctttgccaagtgttccagccaccggc

SEQ ID NO: 11767 - RNA, 80 nt, synthetic construct
  source 1..80: mol_type = other RNA
tgagatttgtttactgaaggagcagctcttttctgaacctgaagctgctgttacctttgccaagtgttccagccagcggc

SEQ ID NO: 11768 - RNA, 80 nt, synthetic construct
  source 1..80: mol_type = other RNA
tgagatttgtttactgaaggagcagctcttttctgaacctgaagctgctgttacctttgccaagtgttccagccaacggc

SEQ ID NO: 11769 - RNA, 80 nt, synthetic construct
  source 1..80: mol_type = other RNA
tgagatttgtttactgaaggagcagctcttttctgaacctgaagctgctgttacctttgccaagtgttccagccatcggc

SEQ ID NO: 11770 - RNA, 80 nt, synthetic construct
  source 1..80: mol_type = other RNA
tgagatttgtttactgaaggagcagctcttttctgaacctgaagctgctgttacctttgccaagtgttccagccatctgc

SEQ ID NO: 11771 - RNA, 81 nt, synthetic construct
  source 1..81: mol_type = other RNA
gtgagatttgtttactgaaggagcagctcttttctgaacctgaagctgctgttacctttgccaagtgttccagccaccggc

SEQ ID NO: 11772 - RNA, 81 nt, synthetic construct
  source 1..81: mol_type = other RNA
gtgagatttgtttactgaaggagcagctcttttctgaacctgaagctgctgttacctttgccaagtgttccagccaacggc

SEQ ID NO: 11773 - RNA, 81 nt, synthetic construct
  source 1..81: mol_type = other RNA
gtgagatttgtttactgaaggagcagctcttttctgaacctgaagctgctgttacctttgccaagtgttccagccatcggc

SEQ ID NO: 11774 - RNA, 81 nt, synthetic construct
  source 1..81: mol_type = other RNA
gtgagatttgtttactgaaggagcagctcttttctgaacctgaagctgctgttacctttgccaagtgttccagccatctgc

SEQ ID NO: 11775 - RNA, 81 nt, synthetic construct
  source 1..81: mol_type = other RNA
gtgagatttgtttactgaaggagcagctcttttctgaacctgaagctgctgttacctttgccaagtgttccagccagcggc

SEQ ID NO: 11776 - RNA, 82 nt, synthetic construct
  source 1..82: mol_type = other RNA
agtgagatttgtttactgaaggagcagctcttttctgaacctgaagctgctgttacctttgccaagtgttccagccaacggc

SEQ ID NO: 11777 - RNA, 82 nt, synthetic construct
  source 1..82: mol_type = other RNA
agtgagatttgtttactgaaggagcagctcttttctgaacctgaagctgctgttacctttgccaagtgttccagccaccggc

SEQ ID NO: 11778 - RNA, 82 nt, synthetic construct
  source 1..82: mol_type = other RNA
agtgagatttgtttactgaaggagcagctcttttctgaacctgaagctgctgttacctttgccaagtgttccagccagcggc

SEQ ID NO: 11779 - RNA, 82 nt, synthetic construct
  source 1..82: mol_type = other RNA
agtgagatttgtttactgaaggagcagctcttttctgaacctgaagctgctgttacctttgccaagtgttccagccatcggc

SEQ ID NO: 11780 - RNA, 82 nt, synthetic construct
  source 1..82: mol_type = other RNA
agtgagatttgtttactgaaggagcagctcttttctgaacctgaagctgctgttacctttgccaagtgttccagccatctgc

SEQ ID NO: 11781 - RNA, 83 nt, synthetic construct
  source 1..83: mol_type = other RNA
aagtgagatttgtttactgaaggagcagctcttttctgaacctgaagctgctgttacctttgccaagtgttccagccatcggc

SEQ ID NO: 11782 - RNA, 83 nt, synthetic construct
  source 1..83: mol_type = other RNA
aagtgagatttgtttactgaaggagcagctcttttctgaacctgaagctgctgttacctttgccaagtgttccagccaacggc

SEQ ID NO: 11783 - RNA, 83 nt, synthetic construct
  source 1..83: mol_type = other RNA
aagtgagatttgtttactgaaggagcagctcttttctgaacctgaagctgctgttacctttgccaagtgttccagccaccggc

SEQ ID NO: 11784 - RNA, 83 nt, synthetic construct
  source 1..83: mol_type = other RNA
aagtgagatttgtttactgaaggagcagctcttttctgaacctgaagctgctgttacctttgccaagtgttccagccagcggc

SEQ ID NO: 11785 - RNA, 83 nt, synthetic construct
  source 1..83: mol_type = other RNA
aagtgagatttgtttactgaaggagcagctcttttctgaacctgaagctgctgttacctttgccaagtgttccagccatctgc

SEQ ID NO: 11786 - RNA, 84 nt, synthetic construct
  source 1..84: mol_type = other RNA
gaagtgagatttgtttactgaaggagcagctcttttctgaacctgaagctgctgttacctttgccaagtgttccagccatcggc

SEQ ID NO: 11787 - RNA, 84 nt, synthetic construct
  source 1..84: mol_type = other RNA
gaagtgagatttgtttactgaaggagcagctcttttctgaacctgaagctgctgttacctttgccaagtgttccagccagcggc

SEQ ID NO: 11788 - RNA, 84 nt, synthetic construct
  source 1..84: mol_type = other RNA
gaagtgagatttgtttactgaaggagcagctcttttctgaacctgaagctgctgttacctttgccaagtgttccagccatctgc

SEQ ID NO: 11789 - RNA, 84 nt, synthetic construct
  source 1..84: mol_type = other RNA
gaagtgagatttgtttactgaaggagcagctcttttctgaacctgaagctgctgttacctttgccaagtgttccagccaacggc

SEQ ID NO: 11790 - RNA, 84 nt, synthetic construct
  source 1..84: mol_type = other RNA
gaagtgagatttgtttactgaaggagcagctcttttctgaacctgaagctgctgttacctttgccaagtgttccagccaccggc

SEQ ID NO: 11791 - RNA, 85 nt, synthetic construct
  source 1..85: mol_type = other RNA
ggaagtgagatttgtttactgaaggagcagctcttttctgaacctgaagctgctgttacctttgccaagtgttccagccaacggc

SEQ ID NO: 11792 - RNA, 85 nt, synthetic construct
  source 1..85: mol_type = other RNA
ggaagtgagatttgtttactgaaggagcagctcttttctgaacctgaagctgctgttacctttgccaagtgttccagccagcggc

SEQ ID NO: 11793 - RNA, 85 nt, synthetic construct
  source 1..85: mol_type = other RNA
ggaagtgagatttgtttactgaaggagcagctcttttctgaacctgaagctgctgttacctttgccaagtgttccagccaccggc

SEQ ID NO: 11794 - RNA, 85 nt, synthetic construct
  source 1..85: mol_type = other RNA
ggaagtgagatttgtttactgaaggagcagctcttttctgaacctgaagctgctgttacctttgccaagtgttccagccatcggc

SEQ ID NO: 11795 - RNA, 85 nt, synthetic construct
  source 1..85: mol_type = other RNA
ggaagtgagatttgtttactgaaggagcagctcttttctgaacctgaagctgctgttacctttgccaagtgttccagccatctgc

SEQ ID NO: 11796 - RNA, 86 nt, synthetic construct
  source 1..86: mol_type = other RNA
aggaagtgagatttgtttactgaaggagcagctcttttctgaacctgaagctgctgttacctttgccaagtgttccagccaacggc

SEQ ID NO: 11797 - RNA, 86 nt, synthetic construct
  source 1..86: mol_type = other RNA
aggaagtgagatttgtttactgaaggagcagctcttttctgaacctgaagctgctgttacctttgccaagtgttccagccatctgc

SEQ ID NO: 11798 - RNA, 86 nt, synthetic construct
  source 1..86: mol_type = other RNA
aggaagtgagatttgtttactgaaggagcagctcttttctgaacctgaagctgctgttacctttgccaagtgttccagccagcggc

SEQ ID NO: 11799 - RNA, 86 nt, synthetic construct
  source 1..86: mol_type = other RNA
aggaagtgagatttgtttactgaaggagcagctcttttctgaacctgaagctgctgttacctttgccaagtgttccagccaccggc

SEQ ID NO: 11800 - RNA, 86 nt, synthetic construct
  source 1..86: mol_type = other RNA
aggaagtgagatttgtttactgaaggagcagctcttttctgaacctgaagctgctgttacctttgccaagtgttccagccatcggc

SEQ ID NO: 11801 - RNA, 87 nt, synthetic construct
  source 1..87: mol_type = other RNA
gaggaagtgagatttgtttactgaaggagcagctcttttctgaacctgaagctgctgttacctttgccaagtgttccagccagcggc

SEQ ID NO: 11802 - RNA, 87 nt, synthetic construct
  source 1..87: mol_type = other RNA
gaggaagtgagatttgtttactgaaggagcagctcttttctgaacctgaagctgctgttacctttgccaagtgttccagccatctgc

SEQ ID NO: 11803 - RNA, 87 nt, synthetic construct
  source 1..87: mol_type = other RNA
gaggaagtgagatttgtttactgaaggagcagctcttttctgaacctgaagctgctgttacctttgccaagtgttccagccaacggc

SEQ ID NO: 11804 - RNA, 87 nt, synthetic construct
  source 1..87: mol_type = other RNA
gaggaagtgagatttgtttactgaaggagcagctcttttctgaacctgaagctgctgttacctttgccaagtgttccagccaccggc

SEQ ID NO: 11805 - RNA, 87 nt, synthetic construct
  source 1..87: mol_type = other RNA
gaggaagtgagatttgtttactgaaggagcagctcttttctgaacctgaagctgctgttacctttgccaagtgttccagccatcggc

SEQ ID NO: 11806 - RNA, 88 nt, synthetic construct
  source 1..88: mol_type = other RNA
agaggaagtgagatttgtttactgaaggagcagctcttttctgaacctgaagctgctgttacctttgccaagtgttccagccatcggc

SEQ ID NO: 11807 - RNA, 88 nt, synthetic construct
  source 1..88: mol_type = other RNA
agaggaagtgagatttgtttactgaaggagcagctcttttctgaacctgaagctgctgttacctttgccaagtgttccagccaccggc

SEQ ID NO: 11808 - RNA, 88 nt, synthetic construct
  source 1..88: mol_type = other RNA
agaggaagtgagatttgtttactgaaggagcagctcttttctgaacctgaagctgctgttacctttgccaagtgttccagccaacggc

SEQ ID NO: 11809 - RNA, 88 nt, synthetic construct
  source 1..88: mol_type = other RNA
agaggaagtgagatttgtttactgaaggagcagctcttttctgaacctgaagctgctgttacctttgccaagtgttccagccatctgc

SEQ ID NO: 11810 - RNA, 88 nt, synthetic construct
  source 1..88: mol_type = other RNA
agaggaagtgagatttgtttactgaaggagcagctcttttctgaacctgaagctgctgttacctttgccaagtgttccagccagcggc

SEQ ID NO: 11811 - RNA, 89 nt, synthetic construct
  source 1..89: mol_type = other RNA
cagaggaagtgagatttgtttactgaaggagcagctcttttctgaacctgaagctgctgttacctttgccaagtgttccagccatcggc

SEQ ID NO: 11812 - RNA, 89 nt, synthetic construct
  source 1..89: mol_type = other RNA
cagaggaagtgagatttgtttactgaaggagcagctcttttctgaacctgaagctgctgttacctttgccaagtgttccagccaccggc

SEQ ID NO: 11813 - RNA, 89 nt, synthetic construct
  source 1..89: mol_type = other RNA
cagaggaagtgagatttgtttactgaaggagcagctcttttctgaacctgaagctgctgttacctttgccaagtgttccagccatctgc

SEQ ID NO: 11814 - RNA, 89 nt, synthetic construct
  source 1..89: mol_type = other RNA
cagaggaagtgagatttgtttactgaaggagcagctcttttctgaacctgaagctgctgttacctttgccaagtgttccagccaacggc

SEQ ID NO: 11815 - RNA, 89 nt, synthetic construct
  source 1..89: mol_type = other RNA
cagaggaagtgagatttgtttactgaaggagcagctcttttctgaacctgaagctgctgttacctttgccaagtgttccagccagcggc

SEQ ID NO: 11816 - RNA, 90 nt, synthetic construct
  source 1..90: mol_type = other RNA
tcagaggaagtgagatttgtttactgaaggagcagctcttttctgaacctgaagctgctgttacctttgccaagtgttccagccaccggc

SEQ ID NO: 11817 - RNA, 90 nt, synthetic construct
  source 1..90: mol_type = other RNA
tcagaggaagtgagatttgtttactgaaggagcagctcttttctgaacctgaagctgctgttacctttgccaagtgttccagccagcggc

SEQ ID NO: 11818 - RNA, 90 nt, synthetic construct
  source 1..90: mol_type = other RNA
tcagaggaagtgagatttgtttactgaaggagcagctcttttctgaacctgaagctgctgttacctttgccaagtgttccagccatcggc

SEQ ID NO: 11819 - RNA, 90 nt, synthetic construct
  source 1..90: mol_type = other RNA
tcagaggaagtgagatttgtttactgaaggagcagctcttttctgaacctgaagctgctgttacctttgccaagtgttccagccatctgc

SEQ ID NO: 11820 - RNA, 90 nt, synthetic construct
  source 1..90: mol_type = other RNA
tcagaggaagtgagatttgtttactgaaggagcagctcttttctgaacctgaagctgctgttacctttgccaagtgttccagccaacggc

SEQ ID NO: 11821 - RNA, 91 nt, synthetic construct
  source 1..91: mol_type = other RNA
ttcagaggaagtgagatttgtttactgaaggagcagctcttttctgaacctgaagctgctgttacctttgccaagtgttccagccaccggc

SEQ ID NO: 11822 - RNA, 91 nt, synthetic construct
  source 1..91: mol_type = other RNA
ttcagaggaagtgagatttgtttactgaaggagcagctcttttctgaacctgaagctgctgttacctttgccaagtgttccagccaacggc

SEQ ID NO: 11823 - RNA, 91 nt, synthetic construct
  source 1..91: mol_type = other RNA
ttcagaggaagtgagatttgtttactgaaggagcagctcttttctgaacctgaagctgctgttacctttgccaagtgttccagccagcggc

SEQ ID NO: 11824 - RNA, 91 nt, synthetic construct
  source 1..91: mol_type = other RNA
ttcagaggaagtgagatttgtttactgaaggagcagctcttttctgaacctgaagctgctgttacctttgccaagtgttccagccatctgc

SEQ ID NO: 11825 - RNA, 91 nt, synthetic construct
  source 1..91: mol_type = other RNA
ttcagaggaagtgagatttgtttactgaaggagcagctcttttctgaacctgaagctgctgttacctttgccaagtgttccagccatcggc

SEQ ID NO: 11826 - RNA, 92 nt, synthetic construct
  source 1..92: mol_type = other RNA
gttcagaggaagtgagatttgtttactgaaggagcagctcttttctgaacctgaagctgctgttacctttgccaagtgttccagccagcggc

SEQ ID NO: 11827 - RNA, 92 nt, synthetic construct
  source 1..92: mol_type = other RNA
gttcagaggaagtgagatttgtttactgaaggagcagctcttttctgaacctgaagctgctgttacctttgccaagtgttccagccatcggc

SEQ ID NO: 11828 - RNA, 92 nt, synthetic construct
  source 1..92: mol_type = other RNA
gttcagaggaagtgagatttgtttactgaaggagcagctcttttctgaacctgaagctgctgttacctttgccaagtgttccagccatctgc

SEQ ID NO: 11829 - RNA, 92 nt, synthetic construct
  source 1..92: mol_type = other RNA
gttcagaggaagtgagatttgtttactgaaggagcagctcttttctgaacctgaagctgctgttacctttgccaagtgttccagccaacggc

SEQ ID NO: 11830 - RNA, 92 nt, synthetic construct
  source 1..92: mol_type = other RNA
gttcagaggaagtgagatttgtttactgaaggagcagctcttttctgaacctgaagctgctgttacctttgccaagtgttccagccaccggc

SEQ ID NO: 11831 - RNA, 93 nt, synthetic construct
  source 1..93: mol_type = other RNA
tgttcagaggaagtgagatttgtttactgaaggagcagctcttttctgaacctgaagctgctgttacctttgccaagtgttccagccatcggc

SEQ ID NO: 11832 - RNA, 93 nt, synthetic construct
  source 1..93: mol_type = other RNA
tgttcagaggaagtgagatttgtttactgaaggagcagctcttttctgaacctgaagctgctgttacctttgccaagtgttccagccatctgc

SEQ ID NO: 11833 - RNA, 93 nt, synthetic construct
  source 1..93: mol_type = other RNA
tgttcagaggaagtgagatttgtttactgaaggagcagctcttttctgaacctgaagctgctgttacctttgccaagtgttccagccagcggc

SEQ ID NO: 11834 - RNA, 93 nt, synthetic construct
  source 1..93: mol_type = other RNA
tgttcagaggaagtgagatttgtttactgaaggagcagctcttttctgaacctgaagctgctgttacctttgccaagtgttccagccaacggc

SEQ ID NO: 11835 - RNA, 93 nt, synthetic construct
  source 1..93: mol_type = other RNA
tgttcagaggaagtgagatttgtttactgaaggagcagctcttttctgaacctgaagctgctgttacctttgccaagtgttccagccaccggc

SEQ ID NO: 11836 - RNA, 94 nt, synthetic construct
  source 1..94: mol_type = other RNA
gtgttcagaggaagtgagatttgtttactgaaggagcagctcttttctgaacctgaagctgctgttacctttgccaagtgttccagccaccggc

SEQ ID NO: 11837 - RNA, 94 nt, synthetic construct
  source 1..94: mol_type = other RNA
gtgttcagaggaagtgagatttgtttactgaaggagcagctcttttctgaacctgaagctgctgttacctttgccaagtgttccagccatcggc

SEQ ID NO: 11838 - RNA, 94 nt, synthetic construct
  source 1..94: mol_type = other RNA
gtgttcagaggaagtgagatttgtttactgaaggagcagctcttttctgaacctgaagctgctgttacctttgccaagtgttccagccagcggc

SEQ ID NO: 11839 - RNA, 94 nt, synthetic construct
  source 1..94: mol_type = other RNA
gtgttcagaggaagtgagatttgtttactgaaggagcagctcttttctgaacctgaagctgctgttacctttgccaagtgttccagccaacggc

SEQ ID NO: 11840 - RNA, 94 nt, synthetic construct
  source 1..94: mol_type = other RNA
gtgttcagaggaagtgagatttgtttactgaaggagcagctcttttctgaacctgaagctgctgttacctttgccaagtgttccagccatctgc

SEQ ID NO: 11841 - RNA, 95 nt, synthetic construct
  source 1..95: mol_type = other RNA
ggtgttcagaggaagtgagatttgtttactgaaggagcagctcttttctgaacctgaagctgctgttacctttgccaagtgttccagccatcggc

SEQ ID NO: 11842 - RNA, 95 nt, synthetic construct
  source 1..95: mol_type = other RNA
ggtgttcagaggaagtgagatttgtttactgaaggagcagctcttttctgaacctgaagctgctgttacctttgccaagtgttccagccagcggc

SEQ ID NO: 11843 - RNA, 95 nt, synthetic construct
  source 1..95: mol_type = other RNA
ggtgttcagaggaagtgagatttgtttactgaaggagcagctcttttctgaacctgaagctgctgttacctttgccaagtgttccagccaccggc

SEQ ID NO: 11844 - RNA, 95 nt, synthetic construct
  source 1..95: mol_type = other RNA
ggtgttcagaggaagtgagatttgtttactgaaggagcagctcttttctgaacctgaagctgctgttacctttgccaagtgttccagccatctgc

SEQ ID NO: 11845 - RNA, 95 nt, synthetic construct
  source 1..95: mol_type = other RNA
ggtgttcagaggaagtgagatttgtttactgaaggagcagctcttttctgaacctgaagctgctgttacctttgccaagtgttccagccaacggc

SEQ ID NO: 11846 - RNA, 96 nt, synthetic construct
  source 1..96: mol_type = other RNA
tggtgttcagaggaagtgagatttgtttactgaaggagcagctcttttctgaacctgaagctgctgttacctttgccaagtgttccagccagcggc

SEQ ID NO: 11847 - RNA, 96 nt, synthetic construct
  source 1..96: mol_type = other RNA
tggtgttcagaggaagtgagatttgtttactgaaggagcagctcttttctgaacctgaagctgctgttacctttgccaagtgttccagccatctgc

SEQ ID NO: 11848 - RNA, 96 nt, synthetic construct
  source 1..96: mol_type = other RNA
tggtgttcagaggaagtgagatttgtttactgaaggagcagctcttttctgaacctgaagctgctgttacctttgccaagtgttccagccaacggc

SEQ ID NO: 11849 - RNA, 96 nt, synthetic construct
  source 1..96: mol_type = other RNA
tggtgttcagaggaagtgagatttgtttactgaaggagcagctcttttctgaacctgaagctgctgttacctttgccaagtgttccagccaccggc

SEQ ID NO: 11850 - RNA, 96 nt, synthetic construct
  source 1..96: mol_type = other RNA
tggtgttcagaggaagtgagatttgtttactgaaggagcagctcttttctgaacctgaagctgctgttacctttgccaagtgttccagccatcggc

SEQ ID NO: 11851 - RNA, 97 nt, synthetic construct
  source 1..97: mol_type = other RNA
atggtgttcagaggaagtgagatttgtttactgaaggagcagctcttttctgaacctgaagctgctgttacctttgccaagtgttccagccaacggc

SEQ ID NO: 11852 - RNA, 97 nt, synthetic construct
  source 1..97: mol_type = other RNA
atggtgttcagaggaagtgagatttgtttactgaaggagcagctcttttctgaacctgaagctgctgttacctttgccaagtgttccagccaccggc

SEQ ID NO: 11853 - RNA, 97 nt, synthetic construct
  source 1..97: mol_type = other RNA
atggtgttcagaggaagtgagatttgtttactgaaggagcagctcttttctgaacctgaagctgctgttacctttgccaagtgttccagccatcggc

SEQ ID NO: 11854 - RNA, 97 nt, synthetic construct
  source 1..97: mol_type = other RNA
atggtgttcagaggaagtgagatttgtttactgaaggagcagctcttttctgaacctgaagctgctgttacctttgccaagtgttccagccatctgc

SEQ ID NO: 11855 - RNA, 97 nt, synthetic construct
  source 1..97: mol_type = other RNA
atggtgttcagaggaagtgagatttgtttactgaaggagcagctcttttctgaacctgaagctgctgttacctttgccaagtgttccagccagcggc

SEQ ID NO: 11856 - RNA, 98 nt, synthetic construct
  source 1..98: mol_type = other RNA
catggtgttcagaggaagtgagatttgtttactgaaggagcagctcttttctgaacctgaagctgctgttacctttgccaagtgttccagccatcggc

SEQ ID NO: 11857 - RNA, 98 nt, synthetic construct
  source 1..98: mol_type = other RNA
catggtgttcagaggaagtgagatttgtttactgaaggagcagctcttttctgaacctgaagctgctgttacctttgccaagtgttccagccagcggc

SEQ ID NO: 11858 - RNA, 98 nt, synthetic construct
  source 1..98: mol_type = other RNA
catggtgttcagaggaagtgagatttgtttactgaaggagcagctcttttctgaacctgaagctgctgttacctttgccaagtgttccagccaccggc

SEQ ID NO: 11859 - RNA, 98 nt, synthetic construct
  source 1..98: mol_type = other RNA
catggtgttcagaggaagtgagatttgtttactgaaggagcagctcttttctgaacctgaagctgctgttacctttgccaagtgttccagccatctgc

SEQ ID NO: 11860 - RNA, 98 nt, synthetic construct
  source 1..98: mol_type = other RNA
catggtgttcagaggaagtgagatttgtttactgaaggagcagctcttttctgaacctgaagctgctgttacctttgccaagtgttccagccaacggc

SEQ ID NO: 11861 - RNA, 99 nt, synthetic construct
  source 1..99: mol_type = other RNA
acatggtgttcagaggaagtgagatttgtttactgaaggagcagctcttttctgaacctgaagctgctgttacctttgccaagtgttccagccagcggc

SEQ ID NO: 11862 - RNA, 99 nt, synthetic construct
  source 1..99: mol_type = other RNA
acatggtgttcagaggaagtgagatttgtttactgaaggagcagctcttttctgaacctgaagctgctgttacctttgccaagtgttccagccatctgc

SEQ ID NO: 11863 - RNA, 99 nt, synthetic construct
  source 1..99: mol_type = other RNA
acatggtgttcagaggaagtgagatttgtttactgaaggagcagctcttttctgaacctgaagctgctgttacctttgccaagtgttccagccatcggc

SEQ ID NO: 11864 - RNA, 99 nt, synthetic construct
  source 1..99: mol_type = other RNA
acatggtgttcagaggaagtgagatttgtttactgaaggagcagctcttttctgaacctgaagctgctgttacctttgccaagtgttccagccaacggc

SEQ ID NO: 11865 - RNA, 99 nt, synthetic construct
  source 1..99: mol_type = other RNA
acatggtgttcagaggaagtgagatttgtttactgaaggagcagctcttttctgaacctgaagctgctgttacctttgccaagtgttccagccaccggc

SEQ ID NO: 11866 - RNA, 100 nt, synthetic construct
  source 1..100: mol_type = other RNA
aacatggtgttcagaggaagtgagatttgtttactgaaggagcagctcttttctgaacctgaagctgctgttacctttgccaagtgttccagccatcggc

SEQ ID NO: 11867 - RNA, 100 nt, synthetic construct
  source 1..100: mol_type = other RNA
aacatggtgttcagaggaagtgagatttgtttactgaaggagcagctcttttctgaacctgaagctgctgttacctttgccaagtgttccagccaccggc

SEQ ID NO: 11868 - RNA, 100 nt, synthetic construct
  source 1..100: mol_type = other RNA
aacatggtgttcagaggaagtgagatttgtttactgaaggagcagctcttttctgaacctgaagctgctgttacctttgccaagtgttccagccatctgc

SEQ ID NO: 11869 - RNA, 100 nt, synthetic construct
  source 1..100: mol_type = other RNA
aacatggtgttcagaggaagtgagatttgtttactgaaggagcagctcttttctgaacctgaagctgctgttacctttgccaagtgttccagccagcggc

SEQ ID NO: 11870 - RNA, 100 nt, synthetic construct
  source 1..100: mol_type = other RNA
aacatggtgttcagaggaagtgagatttgtttactgaaggagcagctcttttctgaacctgaagctgctgttacctttgccaagtgttccagccaacggc

SEQ ID NO: 11871 - RNA, 20 nt, synthetic construct
  source 1..20: mol_type = other RNA
tgccaagtgttccagccaac

SEQ ID NO: 11872 - RNA, 20 nt, synthetic construct
  source 1..20: mol_type = other RNA
ttgccaagtgttccagccaa

SEQ ID NO: 11873 - RNA, 20 nt, synthetic construct
  source 1..20: mol_type = other RNA
gtgttccagccaacggccca

SEQ ID NO: 11874 - RNA, 20 nt, synthetic construct
  source 1..20: mol_type = other RNA
tgccaagtgttccagccatc

SEQ ID NO: 11875 - RNA, 20 nt, synthetic construct
  source 1..20: mol_type = other RNA
gtgttccagccagcggccca

SEQ ID NO: 11876 - RNA, 20 nt, synthetic construct
  source 1..20: mol_type = other RNA
ttgccaagtgttccagccat

SEQ ID NO: 11877 - RNA, 20 nt, synthetic construct
  source 1..20: mol_type = other RNA
tgccaagtgttccagccagc

SEQ ID NO: 11878 - RNA, 20 nt, synthetic construct
  source 1..20: mol_type = other RNA
agtgttccagccaacggccc

SEQ ID NO: 11879 - RNA, 20 nt, synthetic construct
  source 1..20: mol_type = other RNA
agtgttccagccagcggccc

SEQ ID NO: 11880 - RNA, 20 nt, synthetic construct
  source 1..20: mol_type = other RNA
ttgccaagtgttccagccag

SEQ ID NO: 11881 - RNA, 20 nt, synthetic construct
  source 1..20: mol_type = other RNA
agtgttccagccatctgccc

SEQ ID NO: 11882 - RNA, 20 nt, synthetic construct
  source 1..20: mol_type = other RNA
agtgttccagccatcggccc

SEQ ID NO: 11883 - RNA, 20 nt, synthetic construct
  source 1..20: mol_type = other RNA
gtgttccagccatctgccca

SEQ ID NO: 11884 - RNA, 20 nt, synthetic construct
  source 1..20: mol_type = other RNA
gtgttccagccatcggccca

SEQ ID NO: 11885 - RNA, 16 nt, synthetic construct
  source 1..16: mol_type = other RNA
attgccctgggcctgt

SEQ ID NO: 11886 - RNA, 17 nt, synthetic construct
  source 1..17: mol_type = other RNA
cattgccctgggcctgt

SEQ ID NO: 11887 - RNA, 18 nt, synthetic construct
  source 1..18: mol_type = other RNA
tcattgccctgggcctgt

SEQ ID NO: 11888 - RNA, 19 nt, synthetic construct
  source 1..19: mol_type = other RNA
ttcattgccctgggcctgt

SEQ ID NO: 11889 - RNA, 20 nt, synthetic construct
  source 1..20: mol_type = other RNA
gttcattgccctgggcctgt

SEQ ID NO: 11890 - RNA, 21 nt, synthetic construct
  source 1..21: mol_type = other RNA
tgttcattgccctgggcctgt

SEQ ID NO: 11891 - RNA, 22 nt, synthetic construct
  source 1..22: mol_type = other RNA
gtgttcattgccctgggcctgt

SEQ ID NO: 11892-11897 - skipped (6 entries)

SEQ ID NO: 11898 - RNA, 10 nt, synthetic construct
  source 1..10: mol_type = other RNA
ggcccagggc

SEQ ID NO: 11899 - RNA, 11 nt, synthetic construct
  source 1..11: mol_type = other RNA
ggcccagggca

SEQ ID NO: 11900 - RNA, 12 nt, synthetic construct
  source 1..12: mol_type = other RNA
ggcccagggcaa

SEQ ID NO: 11901 - RNA, 13 nt, synthetic construct
  source 1..13: mol_type = other RNA
ggcccagggcaat

SEQ ID NO: 11902 - RNA, 14 nt, synthetic construct
  source 1..14: mol_type = other RNA
ggcccagggcaatg

SEQ ID NO: 11903 - RNA, 15 nt, synthetic construct
  source 1..15: mol_type = other RNA
ggcccagggcaatga

SEQ ID NO: 11904 - RNA, 16 nt, synthetic construct
  source 1..16: mol_type = other RNA
ggcccagggcaatgaa

SEQ ID NO: 11905 - RNA, 17 nt, synthetic construct
  source 1..17: mol_type = other RNA
ggcccagggcaatgaac

SEQ ID NO: 11906 - RNA, 18 nt, synthetic construct
  source 1..18: mol_type = other RNA
ggcccagggcaatgaaca

SEQ ID NO: 11907 - RNA, 19 nt, synthetic construct
  source 1..19: mol_type = other RNA
ggcccagggcaatgaacac

SEQ ID NO: 11908 - RNA, 10 nt, synthetic construct
  source 1..10: mol_type = other RNA
tccagccacc

SEQ ID NO: 11909 - RNA, 11 nt, synthetic construct
  source 1..11: mol_type = other RNA
ttccagccacc

SEQ ID NO: 11910 - RNA, 12 nt, synthetic construct
  source 1..12: mol_type = other RNA
gttccagccacc

SEQ ID NO: 11911 - RNA, 13 nt, synthetic construct
  source 1..13: mol_type = other RNA
tgttccagccacc

SEQ ID NO: 11912 - RNA, 14 nt, synthetic construct
  source 1..14: mol_type = other RNA
gtgttccagccacc

SEQ ID NO: 11913 - RNA, 15 nt, synthetic construct
  source 1..15: mol_type = other RNA
agtgttccagccacc

SEQ ID NO: 11914 - RNA, 16 nt, synthetic construct
  source 1..16: mol_type = other RNA
aagtgttccagccacc

SEQ ID NO: 11915 - RNA, 17 nt, synthetic construct
  source 1..17: mol_type = other RNA
caagtgttccagccacc

SEQ ID NO: 11916 - RNA, 18 nt, synthetic construct
  source 1..18: mol_type = other RNA
ccaagtgttccagccacc

SEQ ID NO: 11917 - RNA, 19 nt, synthetic construct
  source 1..19: mol_type = other RNA
gccaagtgttccagccacc

SEQ ID NO: 11918 - RNA, 20 nt, synthetic construct
  source 1..20: mol_type = other RNA
tgccaagtgttccagccacc

SEQ ID NO: 11919 - RNA, 21 nt, synthetic construct
  source 1..21: mol_type = other RNA
ttgccaagtgttccagccacc

SEQ ID NO: 11920 - RNA, 22 nt, synthetic construct
  source 1..22: mol_type = other RNA
tttgccaagtgttccagccacc

SEQ ID NO: 11921 - RNA, 23 nt, synthetic construct
  source 1..23: mol_type = other RNA
ctttgccaagtgttccagccacc

SEQ ID NO: 11922 - RNA, 24 nt, synthetic construct
  source 1..24: mol_type = other RNA
cctttgccaagtgttccagccacc

SEQ ID NO: 11923 - RNA, 25 nt, synthetic construct
  source 1..25: mol_type = other RNA
acctttgccaagtgttccagccacc

SEQ ID NO: 11924 - RNA, 26 nt, synthetic construct
  source 1..26: mol_type = other RNA
tacctttgccaagtgttccagccacc

SEQ ID NO: 11925 - RNA, 27 nt, synthetic construct
  source 1..27: mol_type = other RNA
ttacctttgccaagtgttccagccacc

SEQ ID NO: 11926 - RNA, 28 nt, synthetic construct
  source 1..28: mol_type = other RNA
gttacctttgccaagtgttccagccacc

SEQ ID NO: 11927 - RNA, 29 nt, synthetic construct
  source 1..29: mol_type = other RNA
tgttacctttgccaagtgttccagccacc

SEQ ID NO: 11928 - RNA, 30 nt, synthetic construct
  source 1..30: mol_type = other RNA
ctgttacctttgccaagtgttccagccacc

SEQ ID NO: 11929 - RNA, 31 nt, synthetic construct
  source 1..31: mol_type = other RNA
gctgttacctttgccaagtgttccagccacc

SEQ ID NO: 11930 - RNA, 32 nt, synthetic construct
  source 1..32: mol_type = other RNA
tgctgttacctttgccaagtgttccagccacc

SEQ ID NO: 11931 - RNA, 33 nt, synthetic construct
  source 1..33: mol_type = other RNA
ctgctgttacctttgccaagtgttccagccacc

SEQ ID NO: 11932 - RNA, 34 nt, synthetic construct
  source 1..34: mol_type = other RNA
gctgctgttacctttgccaagtgttccagccacc

SEQ ID NO: 11933 - RNA, 35 nt, synthetic construct
  source 1..35: mol_type = other RNA
agctgctgttacctttgccaagtgttccagccacc

SEQ ID NO: 11934 - RNA, 36 nt, synthetic construct
  source 1..36: mol_type = other RNA
aagctgctgttacctttgccaagtgttccagccacc

SEQ ID NO: 11935 - RNA, 37 nt, synthetic construct
  source 1..37: mol_type = other RNA
gaagctgctgttacctttgccaagtgttccagccacc

SEQ ID NO: 11936 - RNA, 38 nt, synthetic construct
  source 1..38: mol_type = other RNA
tgaagctgctgttacctttgccaagtgttccagccacc

SEQ ID NO: 11937 - RNA, 39 nt, synthetic construct
  source 1..39: mol_type = other RNA
ctgaagctgctgttacctttgccaagtgttccagccacc

SEQ ID NO: 11938 - RNA, 40 nt, synthetic construct
  source 1..40: mol_type = other RNA
cctgaagctgctgttacctttgccaagtgttccagccacc

SEQ ID NO: 11939 - RNA, 41 nt, synthetic construct
  source 1..41: mol_type = other RNA
acctgaagctgctgttacctttgccaagtgttccagccacc

SEQ ID NO: 11940 - RNA, 42 nt, synthetic construct
  source 1..42: mol_type = other RNA
aacctgaagctgctgttacctttgccaagtgttccagccacc

SEQ ID NO: 11941 - RNA, 43 nt, synthetic construct
  source 1..43: mol_type = other RNA
gaacctgaagctgctgttacctttgccaagtgttccagccacc

SEQ ID NO: 11942 - RNA, 44 nt, synthetic construct
  source 1..44: mol_type = other RNA
tgaacctgaagctgctgttacctttgccaagtgttccagccacc

SEQ ID NO: 11943 - RNA, 45 nt, synthetic construct
  source 1..45: mol_type = other RNA
ctgaacctgaagctgctgttacctttgccaagtgttccagccacc

SEQ ID NO: 11944 - RNA, 46 nt, synthetic construct
  source 1..46: mol_type = other RNA
tctgaacctgaagctgctgttacctttgccaagtgttccagccacc

SEQ ID NO: 11945 - RNA, 47 nt, synthetic construct
  source 1..47: mol_type = other RNA
ttctgaacctgaagctgctgttacctttgccaagtgttccagccacc

SEQ ID NO: 11946 - RNA, 48 nt, synthetic construct
  source 1..48: mol_type = other RNA
tttctgaacctgaagctgctgttacctttgccaagtgttccagccacc

SEQ ID NO: 11947 - RNA, 49 nt, synthetic construct
  source 1..49: mol_type = other RNA
ttttctgaacctgaagctgctgttacctttgccaagtgttccagccacc

SEQ ID NO: 11948 - RNA, 50 nt, synthetic construct
  source 1..50: mol_type = other RNA
cttttctgaacctgaagctgctgttacctttgccaagtgttccagccacc

SEQ ID NO: 11949 - RNA, 51 nt, synthetic construct
  source 1..51: mol_type = other RNA
tcttttctgaacctgaagctgctgttacctttgccaagtgttccagccacc

SEQ ID NO: 11950 - RNA, 52 nt, synthetic construct
  source 1..52: mol_type = other RNA
ctcttttctgaacctgaagctgctgttacctttgccaagtgttccagccacc

SEQ ID NO: 11951 - RNA, 53 nt, synthetic construct
  source 1..53: mol_type = other RNA
gctcttttctgaacctgaagctgctgttacctttgccaagtgttccagccacc

SEQ ID NO: 11952 - RNA, 54 nt, synthetic construct
  source 1..54: mol_type = other RNA
agctcttttctgaacctgaagctgctgttacctttgccaagtgttccagccacc

SEQ ID NO: 11953 - RNA, 55 nt, synthetic construct
  source 1..55: mol_type = other RNA
cagctcttttctgaacctgaagctgctgttacctttgccaagtgttccagccacc

SEQ ID NO: 11954 - RNA, 56 nt, synthetic construct
  source 1..56: mol_type = other RNA
gcagctcttttctgaacctgaagctgctgttacctttgccaagtgttccagccacc

SEQ ID NO: 11955 - RNA, 57 nt, synthetic construct
  source 1..57: mol_type = other RNA
agcagctcttttctgaacctgaagctgctgttacctttgccaagtgttccagccacc

SEQ ID NO: 11956 - RNA, 58 nt, synthetic construct
  source 1..58: mol_type = other RNA
gagcagctcttttctgaacctgaagctgctgttacctttgccaagtgttccagccacc

SEQ ID NO: 11957 - RNA, 59 nt, synthetic construct
  source 1..59: mol_type = other RNA
ggagcagctcttttctgaacctgaagctgctgttacctttgccaagtgttccagccacc

SEQ ID NO: 11958 - RNA, 60 nt, synthetic construct
  source 1..60: mol_type = other RNA
aggagcagctcttttctgaacctgaagctgctgttacctttgccaagtgttccagccacc

SEQ ID NO: 11959 - RNA, 61 nt, synthetic construct
  source 1..61: mol_type = other RNA
aaggagcagctcttttctgaacctgaagctgctgttacctttgccaagtgttccagccacc

SEQ ID NO: 11960 - RNA, 62 nt, synthetic construct
  source 1..62: mol_type = other RNA
gaaggagcagctcttttctgaacctgaagctgctgttacctttgccaagtgttccagccacc

SEQ ID NO: 11961 - RNA, 63 nt, synthetic construct
  source 1..63: mol_type = other RNA
tgaaggagcagctcttttctgaacctgaagctgctgttacctttgccaagtgttccagccacc

SEQ ID NO: 11962 - RNA, 64 nt, synthetic construct
  source 1..64: mol_type = other RNA
ctgaaggagcagctcttttctgaacctgaagctgctgttacctttgccaagtgttccagccacc

SEQ ID NO: 11963 - RNA, 65 nt, synthetic construct
  source 1..65: mol_type = other RNA
actgaaggagcagctcttttctgaacctgaagctgctgttacctttgccaagtgttccagccacc

SEQ ID NO: 11964 - RNA, 66 nt, synthetic construct
  source 1..66: mol_type = other RNA
tactgaaggagcagctcttttctgaacctgaagctgctgttacctttgccaagtgttccagccacc

SEQ ID NO: 11965 - RNA, 67 nt, synthetic construct
  source 1..67: mol_type = other RNA
ttactgaaggagcagctcttttctgaacctgaagctgctgttacctttgccaagtgttccagccacc

SEQ ID NO: 11966 - RNA, 68 nt, synthetic construct
  source 1..68: mol_type = other RNA
tttactgaaggagcagctcttttctgaacctgaagctgctgttacctttgccaagtgttccagccacc

SEQ ID NO: 11967 - RNA, 69 nt, synthetic construct
  source 1..69: mol_type = other RNA
gtttactgaaggagcagctcttttctgaacctgaagctgctgttacctttgccaagtgttccagccacc

SEQ ID NO: 11968 - RNA, 70 nt, synthetic construct
  source 1..70: mol_type = other RNA
tgtttactgaaggagcagctcttttctgaacctgaagctgctgttacctttgccaagtgttccagccacc

SEQ ID NO: 11969 - RNA, 71 nt, synthetic construct
  source 1..71: mol_type = other RNA
ttgtttactgaaggagcagctcttttctgaacctgaagctgctgttacctttgccaagtgttccagccacc

SEQ ID NO: 11970 - RNA, 72 nt, synthetic construct
  source 1..72: mol_type = other RNA
tttgtttactgaaggagcagctcttttctgaacctgaagctgctgttacctttgccaagtgttccagccacc

SEQ ID NO: 11971 - RNA, 73 nt, synthetic construct
  source 1..73: mol_type = other RNA
atttgtttactgaaggagcagctcttttctgaacctgaagctgctgttacctttgccaagtgttccagccacc

SEQ ID NO: 11972 - RNA, 74 nt, synthetic construct
  source 1..74: mol_type = other RNA
gatttgtttactgaaggagcagctcttttctgaacctgaagctgctgttacctttgccaagtgttccagccacc

SEQ ID NO: 11973 - RNA, 75 nt, synthetic construct
  source 1..75: mol_type = other RNA
agatttgtttactgaaggagcagctcttttctgaacctgaagctgctgttacctttgccaagtgttccagccacc

SEQ ID NO: 11974 - RNA, 76 nt, synthetic construct
  source 1..76: mol_type = other RNA
gagatttgtttactgaaggagcagctcttttctgaacctgaagctgctgttacctttgccaagtgttccagccacc

SEQ ID NO: 11975 - RNA, 77 nt, synthetic construct
  source 1..77: mol_type = other RNA
tgagatttgtttactgaaggagcagctcttttctgaacctgaagctgctgttacctttgccaagtgttccagccacc

SEQ ID NO: 11976 - RNA, 78 nt, synthetic construct
  source 1..78: mol_type = other RNA
gtgagatttgtttactgaaggagcagctcttttctgaacctgaagctgctgttacctttgccaagtgttccagccacc

SEQ ID NO: 11977 - RNA, 79 nt, synthetic construct
  source 1..79: mol_type = other RNA
agtgagatttgtttactgaaggagcagctcttttctgaacctgaagctgctgttacctttgccaagtgttccagccacc

SEQ ID NO: 11978 - RNA, 80 nt, synthetic construct
  source 1..80: mol_type = other RNA
aagtgagatttgtttactgaaggagcagctcttttctgaacctgaagctgctgttacctttgccaagtgttccagccacc

SEQ ID NO: 11979 - RNA, 81 nt, synthetic construct
  source 1..81: mol_type = other RNA
gaagtgagatttgtttactgaaggagcagctcttttctgaacctgaagctgctgttacctttgccaagtgttccagccacc

SEQ ID NO: 11980 - RNA, 82 nt, synthetic construct
  source 1..82: mol_type = other RNA
ggaagtgagatttgtttactgaaggagcagctcttttctgaacctgaagctgctgttacctttgccaagtgttccagccacc

SEQ ID NO: 11981 - RNA, 83 nt, synthetic construct
  source 1..83: mol_type = other RNA
aggaagtgagatttgtttactgaaggagcagctcttttctgaacctgaagctgctgttacctttgccaagtgttccagccacc

SEQ ID NO: 11982 - RNA, 84 nt, synthetic construct
  source 1..84: mol_type = other RNA
gaggaagtgagatttgtttactgaaggagcagctcttttctgaacctgaagctgctgttacctttgccaagtgttccagccacc

SEQ ID NO: 11983 - RNA, 85 nt, synthetic construct
  source 1..85: mol_type = other RNA
agaggaagtgagatttgtttactgaaggagcagctcttttctgaacctgaagctgctgttacctttgccaagtgttccagccacc

SEQ ID NO: 11984 - RNA, 86 nt, synthetic construct
  source 1..86: mol_type = other RNA
cagaggaagtgagatttgtttactgaaggagcagctcttttctgaacctgaagctgctgttacctttgccaagtgttccagccacc

SEQ ID NO: 11985 - RNA, 87 nt, synthetic construct
  source 1..87: mol_type = other RNA
tcagaggaagtgagatttgtttactgaaggagcagctcttttctgaacctgaagctgctgttacctttgccaagtgttccagccacc

SEQ ID NO: 11986 - RNA, 88 nt, synthetic construct
  source 1..88: mol_type = other RNA
ttcagaggaagtgagatttgtttactgaaggagcagctcttttctgaacctgaagctgctgttacctttgccaagtgttccagccacc

SEQ ID NO: 11987 - RNA, 89 nt, synthetic construct
  source 1..89: mol_type = other RNA
gttcagaggaagtgagatttgtttactgaaggagcagctcttttctgaacctgaagctgctgttacctttgccaagtgttccagccacc

SEQ ID NO: 11988 - RNA, 90 nt, synthetic construct
  source 1..90: mol_type = other RNA
tgttcagaggaagtgagatttgtttactgaaggagcagctcttttctgaacctgaagctgctgttacctttgccaagtgttccagccacc

SEQ ID NO: 11989 - RNA, 91 nt, synthetic construct
  source 1..91: mol_type = other RNA
gtgttcagaggaagtgagatttgtttactgaaggagcagctcttttctgaacctgaagctgctgttacctttgccaagtgttccagccacc

SEQ ID NO: 11990 - RNA, 92 nt, synthetic construct
  source 1..92: mol_type = other RNA
ggtgttcagaggaagtgagatttgtttactgaaggagcagctcttttctgaacctgaagctgctgttacctttgccaagtgttccagccacc

SEQ ID NO: 11991 - RNA, 93 nt, synthetic construct
  source 1..93: mol_type = other RNA
tggtgttcagaggaagtgagatttgtttactgaaggagcagctcttttctgaacctgaagctgctgttacctttgccaagtgttccagccacc

SEQ ID NO: 11992 - RNA, 94 nt, synthetic construct
  source 1..94: mol_type = other RNA
atggtgttcagaggaagtgagatttgtttactgaaggagcagctcttttctgaacctgaagctgctgttacctttgccaagtgttccagccacc

SEQ ID NO: 11993 - RNA, 95 nt, synthetic construct
  source 1..95: mol_type = other RNA
catggtgttcagaggaagtgagatttgtttactgaaggagcagctcttttctgaacctgaagctgctgttacctttgccaagtgttccagccacc

SEQ ID NO: 11994 - RNA, 96 nt, synthetic construct
  source 1..96: mol_type = other RNA
acatggtgttcagaggaagtgagatttgtttactgaaggagcagctcttttctgaacctgaagctgctgttacctttgccaagtgttccagccacc

SEQ ID NO: 11995 - RNA, 97 nt, synthetic construct
  source 1..97: mol_type = other RNA
aacatggtgttcagaggaagtgagatttgtttactgaaggagcagctcttttctgaacctgaagctgctgttacctttgccaagtgttccagccacc

SEQ ID NO: 11996 - RNA, 98 nt, synthetic construct
  source 1..98: mol_type = other RNA
aaacatggtgttcagaggaagtgagatttgtttactgaaggagcagctcttttctgaacctgaagctgctgttacctttgccaagtgttccagccacc

SEQ ID NO: 11997 - RNA, 99 nt, synthetic construct
  source 1..99: mol_type = other RNA
taaacatggtgttcagaggaagtgagatttgtttactgaaggagcagctcttttctgaacctgaagctgctgttacctttgccaagtgttccagccacc

SEQ ID NO: 11998 - RNA, 100 nt, synthetic construct
  source 1..100: mol_type = other RNA
ctaaacatggtgttcagaggaagtgagatttgtttactgaaggagcagctcttttctgaacctgaagctgctgttacctttgccaagtgttccagccacc

SEQ ID NO: 11999 - RNA, 16 nt, synthetic construct
  source 1..16: mol_type = other RNA
tagtaattctaaacat

SEQ ID NO: 12000 - RNA, 17 nt, synthetic construct
  source 1..17: mol_type = other RNA
ttagtaattctaaacat

SEQ ID NO: 12001 - RNA, 18 nt, synthetic construct
  source 1..18: mol_type = other RNA
attagtaattctaaacat

SEQ ID NO: 12002 - RNA, 19 nt, synthetic construct
  source 1..19: mol_type = other RNA
aattagtaattctaaacat

SEQ ID NO: 12003 - RNA, 20 nt, synthetic construct
  source 1..20: mol_type = other RNA
taattagtaattctaaacat

SEQ ID NO: 12004 - RNA, 21 nt, synthetic construct
  source 1..21: mol_type = other RNA
ataattagtaattctaaacat

SEQ ID NO: 12005 - RNA, 22 nt, synthetic construct
  source 1..22: mol_type = other RNA
tataattagtaattctaaacat

SEQ ID NO: 12006-12012 - skipped (7 entries)

SEQ ID NO: 12013 - RNA, 10 nt, synthetic construct
  source 1..10: mol_type = other RNA
tttagaatta

SEQ ID NO: 12014 - RNA, 11 nt, synthetic construct
  source 1..11: mol_type = other RNA
tttagaattac

SEQ ID NO: 12015 - RNA, 12 nt, synthetic construct
  source 1..12: mol_type = other RNA
tttagaattact

SEQ ID NO: 12016 - RNA, 13 nt, synthetic construct
  source 1..13: mol_type = other RNA
tttagaattacta

SEQ ID NO: 12017 - RNA, 14 nt, synthetic construct
  source 1..14: mol_type = other RNA
tttagaattactaa

SEQ ID NO: 12018 - RNA, 15 nt, synthetic construct
  source 1..15: mol_type = other RNA
tttagaattactaat

SEQ ID NO: 12019 - RNA, 16 nt, synthetic construct
  source 1..16: mol_type = other RNA
tttagaattactaatt

SEQ ID NO: 12020 - RNA, 17 nt, synthetic construct
  source 1..17: mol_type = other RNA
tttagaattactaatta

SEQ ID NO: 12021 - RNA, 18 nt, synthetic construct
  source 1..18: mol_type = other RNA
tttagaattactaattat

SEQ ID NO: 12022 - RNA, 19 nt, synthetic construct
  source 1..19: mol_type = other RNA
tttagaattactaattata

SEQ ID NO: 12023 - RNA, 95 nt, synthetic construct
  source 1..95: mol_type = other RNA
ggtggctggaacacttggcaaaggtaacagcagcttcaggttcagaaaagagctgctccttcagtaaacaaatctcacttcctctgaacaccatg

SEQ ID NO: 12024 - RNA, 96 nt, synthetic construct
  source 1..96: mol_type = other RNA
cggtggctggaacacttggcaaaggtaacagcagcttcaggttcagaaaagagctgctccttcagtaaacaaatctcacttcctctgaacaccatg

SEQ ID NO: 12025 - RNA, 97 nt, synthetic construct
  source 1..97: mol_type = other RNA
ccggtggctggaacacttggcaaaggtaacagcagcttcaggttcagaaaagagctgctccttcagtaaacaaatctcacttcctctgaacaccatg

SEQ ID NO: 12026 - RNA, 98 nt, synthetic construct
  source 1..98: mol_type = other RNA
gccggtggctggaacacttggcaaaggtaacagcagcttcaggttcagaaaagagctgctccttcagtaaacaaatctcacttcctctgaacaccatg

SEQ ID NO: 12027 - RNA, 99 nt, synthetic construct
  source 1..99: mol_type = other RNA
ggccggtggctggaacacttggcaaaggtaacagcagcttcaggttcagaaaagagctgctccttcagtaaacaaatctcacttcctctgaacaccatg

SEQ ID NO: 12028 - RNA, 100 nt, synthetic construct
  source 1..100: mol_type = other RNA
gggccggtggctggaacacttggcaaaggtaacagcagcttcaggttcagaaaagagctgctccttcagtaaacaaatctcacttcctctgaacaccatg

SEQ ID NO: 12029 - RNA, 16 nt, synthetic construct
  source 1..16: mol_type = other RNA
gtaattctaaacatgg

SEQ ID NO: 12030 - RNA, 17 nt, synthetic construct
  source 1..17: mol_type = other RNA
agtaattctaaacatgg

SEQ ID NO: 12031 - RNA, 18 nt, synthetic construct
  source 1..18: mol_type = other RNA
tagtaattctaaacatgg

SEQ ID NO: 12032 - RNA, 19 nt, synthetic construct
  source 1..19: mol_type = other RNA
ttagtaattctaaacatgg

SEQ ID NO: 12033 - RNA, 20 nt, synthetic construct
  source 1..20: mol_type = other RNA
attagtaattctaaacatgg

SEQ ID NO: 12034 - RNA, 21 nt, synthetic construct
  source 1..21: mol_type = other RNA
aattagtaattctaaacatgg

SEQ ID NO: 12035 - RNA, 22 nt, synthetic construct
  source 1..22: mol_type = other RNA
taattagtaattctaaacatgg

SEQ ID NO: 12036-12042 - skipped (7 entries)

SEQ ID NO: 12043 - RNA, 10 nt, synthetic construct
  source 1..10: mol_type = other RNA
tgtttagaat

SEQ ID NO: 12044 - RNA, 11 nt, synthetic construct
  source 1..11: mol_type = other RNA
tgtttagaatt

SEQ ID NO: 12045 - RNA, 12 nt, synthetic construct
  source 1..12: mol_type = other RNA
tgtttagaatta

SEQ ID NO: 12046 - RNA, 13 nt, synthetic construct
  source 1..13: mol_type = other RNA
tgtttagaattac

SEQ ID NO: 12047 - RNA, 14 nt, synthetic construct
  source 1..14: mol_type = other RNA
tgtttagaattact

SEQ ID NO: 12048 - RNA, 15 nt, synthetic construct
  source 1..15: mol_type = other RNA
tgtttagaattacta

SEQ ID NO: 12049 - RNA, 16 nt, synthetic construct
  source 1..16: mol_type = other RNA
tgtttagaattactaa

SEQ ID NO: 12050 - RNA, 17 nt, synthetic construct
  source 1..17: mol_type = other RNA
tgtttagaattactaat

SEQ ID NO: 12051 - RNA, 18 nt, synthetic construct
  source 1..18: mol_type = other RNA
tgtttagaattactaatt

SEQ ID NO: 12052 - RNA, 19 nt, synthetic construct
  source 1..19: mol_type = other RNA
tgtttagaattactaatta

SEQ ID NO: 12053 - RNA, 93 nt, synthetic construct
  source 1..93: mol_type = other RNA
ggtggctggaacacttggcaaaggtaacagcagcttcaggttcagaaaagagctgctccttcagtaaacaaatctcacttcctctgaacacca

SEQ ID NO: 12054 - RNA, 94 nt, synthetic construct
  source 1..94: mol_type = other RNA
cggtggctggaacacttggcaaaggtaacagcagcttcaggttcagaaaagagctgctccttcagtaaacaaatctcacttcctctgaacacca

SEQ ID NO: 12055 - RNA, 95 nt, synthetic construct
  source 1..95: mol_type = other RNA
ccggtggctggaacacttggcaaaggtaacagcagcttcaggttcagaaaagagctgctccttcagtaaacaaatctcacttcctctgaacacca

SEQ ID NO: 12056 - RNA, 96 nt, synthetic construct
  source 1..96: mol_type = other RNA
gccggtggctggaacacttggcaaaggtaacagcagcttcaggttcagaaaagagctgctccttcagtaaacaaatctcacttcctctgaacacca

SEQ ID NO: 12057 - RNA, 97 nt, synthetic construct
  source 1..97: mol_type = other RNA
ggccggtggctggaacacttggcaaaggtaacagcagcttcaggttcagaaaagagctgctccttcagtaaacaaatctcacttcctctgaacacca

SEQ ID NO: 12058 - RNA, 98 nt, synthetic construct
  source 1..98: mol_type = other RNA
gggccggtggctggaacacttggcaaaggtaacagcagcttcaggttcagaaaagagctgctccttcagtaaacaaatctcacttcctctgaacacca

SEQ ID NO: 12059 - RNA, 99 nt, synthetic construct
  source 1..99: mol_type = other RNA
tgggccggtggctggaacacttggcaaaggtaacagcagcttcaggttcagaaaagagctgctccttcagtaaacaaatctcacttcctctgaacacca

SEQ ID NO: 12060 - RNA, 100 nt, synthetic construct
  source 1..100: mol_type = other RNA
ctgggccggtggctggaacacttggcaaaggtaacagcagcttcaggttcagaaaagagctgctccttcagtaaacaaatctcacttcctctgaacacca

SEQ ID NO: 12061 - RNA, 16 nt, synthetic construct
  source 1..16: mol_type = other RNA
catggtgttcagagga

SEQ ID NO: 12062 - RNA, 17 nt, synthetic construct
  source 1..17: mol_type = other RNA
acatggtgttcagagga

SEQ ID NO: 12063 - RNA, 18 nt, synthetic construct
  source 1..18: mol_type = other RNA
aacatggtgttcagagga

SEQ ID NO: 12064 - RNA, 19 nt, synthetic construct
  source 1..19: mol_type = other RNA
aaacatggtgttcagagga

SEQ ID NO: 12065 - RNA, 20 nt, synthetic construct
  source 1..20: mol_type = other RNA
taaacatggtgttcagagga

SEQ ID NO: 12066 - RNA, 21 nt, synthetic construct
  source 1..21: mol_type = other RNA
ctaaacatggtgttcagagga

SEQ ID NO: 12067 - RNA, 22 nt, synthetic construct
  source 1..22: mol_type = other RNA
tctaaacatggtgttcagagga

SEQ ID NO: 12068-12073 - skipped (6 entries)

SEQ ID NO: 12074 - RNA, 10 nt, synthetic construct
  source 1..10: mol_type = other RNA
tctgaacacc

SEQ ID NO: 12075 - RNA, 11 nt, synthetic construct
  source 1..11: mol_type = other RNA
tctgaacacca

SEQ ID NO: 12076 - RNA, 12 nt, synthetic construct
  source 1..12: mol_type = other RNA
tctgaacaccat

SEQ ID NO: 12077 - RNA, 13 nt, synthetic construct
  source 1..13: mol_type = other RNA
tctgaacaccatg

SEQ ID NO: 12078 - RNA, 14 nt, synthetic construct
  source 1..14: mol_type = other RNA
tctgaacaccatgt

SEQ ID NO: 12079 - RNA, 15 nt, synthetic construct
  source 1..15: mol_type = other RNA
tctgaacaccatgtt

SEQ ID NO: 12080 - RNA, 16 nt, synthetic construct
  source 1..16: mol_type = other RNA
tctgaacaccatgttt

SEQ ID NO: 12081 - RNA, 17 nt, synthetic construct
  source 1..17: mol_type = other RNA
tctgaacaccatgttta

SEQ ID NO: 12082 - RNA, 18 nt, synthetic construct
  source 1..18: mol_type = other RNA
tctgaacaccatgtttag

SEQ ID NO: 12083 - RNA, 19 nt, synthetic construct
  source 1..19: mol_type = other RNA
tctgaacaccatgtttaga

SEQ ID NO: 12084 - RNA, 82 nt, synthetic construct
  source 1..82: mol_type = other RNA
ggtggctggaacacttggcaaaggtaacagcagcttcaggttcagaaaagagctgctccttcagtaaacaaatctcacttcc

SEQ ID NO: 12085 - RNA, 83 nt, synthetic construct
  source 1..83: mol_type = other RNA
cggtggctggaacacttggcaaaggtaacagcagcttcaggttcagaaaagagctgctccttcagtaaacaaatctcacttcc

SEQ ID NO: 12086 - RNA, 84 nt, synthetic construct
  source 1..84: mol_type = other RNA
ccggtggctggaacacttggcaaaggtaacagcagcttcaggttcagaaaagagctgctccttcagtaaacaaatctcacttcc

SEQ ID NO: 12087 - RNA, 85 nt, synthetic construct
  source 1..85: mol_type = other RNA
gccggtggctggaacacttggcaaaggtaacagcagcttcaggttcagaaaagagctgctccttcagtaaacaaatctcacttcc

SEQ ID NO: 12088 - RNA, 86 nt, synthetic construct
  source 1..86: mol_type = other RNA
ggccggtggctggaacacttggcaaaggtaacagcagcttcaggttcagaaaagagctgctccttcagtaaacaaatctcacttcc

SEQ ID NO: 12089 - RNA, 87 nt, synthetic construct
  source 1..87: mol_type = other RNA
gggccggtggctggaacacttggcaaaggtaacagcagcttcaggttcagaaaagagctgctccttcagtaaacaaatctcacttcc

SEQ ID NO: 12090 - RNA, 88 nt, synthetic construct
  source 1..88: mol_type = other RNA
tgggccggtggctggaacacttggcaaaggtaacagcagcttcaggttcagaaaagagctgctccttcagtaaacaaatctcacttcc

SEQ ID NO: 12091 - RNA, 89 nt, synthetic construct
  source 1..89: mol_type = other RNA
ctgggccggtggctggaacacttggcaaaggtaacagcagcttcaggttcagaaaagagctgctccttcagtaaacaaatctcacttcc

SEQ ID NO: 12092 - RNA, 90 nt, synthetic construct
  source 1..90: mol_type = other RNA
cctgggccggtggctggaacacttggcaaaggtaacagcagcttcaggttcagaaaagagctgctccttcagtaaacaaatctcacttcc

SEQ ID NO: 12093 - RNA, 91 nt, synthetic construct
  source 1..91: mol_type = other RNA
ccctgggccggtggctggaacacttggcaaaggtaacagcagcttcaggttcagaaaagagctgctccttcagtaaacaaatctcacttcc

SEQ ID NO: 12094 - RNA, 92 nt, synthetic construct
  source 1..92: mol_type = other RNA
gccctgggccggtggctggaacacttggcaaaggtaacagcagcttcaggttcagaaaagagctgctccttcagtaaacaaatctcacttcc

SEQ ID NO: 12095 - RNA, 93 nt, synthetic construct
  source 1..93: mol_type = other RNA
tgccctgggccggtggctggaacacttggcaaaggtaacagcagcttcaggttcagaaaagagctgctccttcagtaaacaaatctcacttcc

SEQ ID NO: 12096 - RNA, 94 nt, synthetic construct
  source 1..94: mol_type = other RNA
ttgccctgggccggtggctggaacacttggcaaaggtaacagcagcttcaggttcagaaaagagctgctccttcagtaaacaaatctcacttcc

SEQ ID NO: 12097 - RNA, 95 nt, synthetic construct
  source 1..95: mol_type = other RNA
attgccctgggccggtggctggaacacttggcaaaggtaacagcagcttcaggttcagaaaagagctgctccttcagtaaacaaatctcacttcc

SEQ ID NO: 12098 - RNA, 96 nt, synthetic construct
  source 1..96: mol_type = other RNA
cattgccctgggccggtggctggaacacttggcaaaggtaacagcagcttcaggttcagaaaagagctgctccttcagtaaacaaatctcacttcc

SEQ ID NO: 12099 - RNA, 97 nt, synthetic construct
  source 1..97: mol_type = other RNA
tcattgccctgggccggtggctggaacacttggcaaaggtaacagcagcttcaggttcagaaaagagctgctccttcagtaaacaaatctcacttcc

SEQ ID NO: 12100 - RNA, 98 nt, synthetic construct
  source 1..98: mol_type = other RNA
ttcattgccctgggccggtggctggaacacttggcaaaggtaacagcagcttcaggttcagaaaagagctgctccttcagtaaacaaatctcacttcc

SEQ ID NO: 12101 - RNA, 99 nt, synthetic construct
  source 1..99: mol_type = other RNA
gttcattgccctgggccggtggctggaacacttggcaaaggtaacagcagcttcaggttcagaaaagagctgctccttcagtaaacaaatctcacttcc

SEQ ID NO: 12102 - RNA, 100 nt, synthetic construct
  source 1..100: mol_type = other RNA
tgttcattgccctgggccggtggctggaacacttggcaaaggtaacagcagcttcaggttcagaaaagagctgctccttcagtaaacaaatctcacttcc

SEQ ID NO: 12103 - RNA, 16 nt, synthetic construct
  source 1..16: mol_type = other RNA
cagaggaagtgagatt

SEQ ID NO: 12104 - RNA, 17 nt, synthetic construct
  source 1..17: mol_type = other RNA
tcagaggaagtgagatt

SEQ ID NO: 12105 - RNA, 18 nt, synthetic construct
  source 1..18: mol_type = other RNA
ttcagaggaagtgagatt

SEQ ID NO: 12106 - RNA, 19 nt, synthetic construct
  source 1..19: mol_type = other RNA
gttcagaggaagtgagatt

SEQ ID NO: 12107 - RNA, 20 nt, synthetic construct
  source 1..20: mol_type = other RNA
tgttcagaggaagtgagatt

SEQ ID NO: 12108 - RNA, 21 nt, synthetic construct
  source 1..21: mol_type = other RNA
gtgttcagaggaagtgagatt

SEQ ID NO: 12109 - RNA, 22 nt, synthetic construct
  source 1..22: mol_type = other RNA
ggtgttcagaggaagtgagatt

SEQ ID NO: 12110-12115 - skipped (6 entries)

SEQ ID NO: 12116 - RNA, 10 nt, synthetic construct
  source 1..10: mol_type = other RNA
ctcacttcct

SEQ ID NO: 12117 - RNA, 11 nt, synthetic construct
  source 1..11: mol_type = other RNA
ctcacttcctc

SEQ ID NO: 12118 - RNA, 12 nt, synthetic construct
  source 1..12: mol_type = other RNA
ctcacttcctct

SEQ ID NO: 12119 - RNA, 13 nt, synthetic construct
  source 1..13: mol_type = other RNA
ctcacttcctctg

SEQ ID NO: 12120 - RNA, 14 nt, synthetic construct
  source 1..14: mol_type = other RNA
ctcacttcctctga

SEQ ID NO: 12121 - RNA, 15 nt, synthetic construct
  source 1..15: mol_type = other RNA
ctcacttcctctgaa

SEQ ID NO: 12122 - RNA, 16 nt, synthetic construct
  source 1..16: mol_type = other RNA
ctcacttcctctgaac

SEQ ID NO: 12123 - RNA, 17 nt, synthetic construct
  source 1..17: mol_type = other RNA
ctcacttcctctgaaca

SEQ ID NO: 12124 - RNA, 18 nt, synthetic construct
  source 1..18: mol_type = other RNA
ctcacttcctctgaacac

SEQ ID NO: 12125 - RNA, 19 nt, synthetic construct
  source 1..19: mol_type = other RNA
ctcacttcctctgaacacc

SEQ ID NO: 12126 - RNA, 73 nt, synthetic construct
  source 1..73: mol_type = other RNA
ggtggctggaacacttggcaaaggtaacagcagcttcaggttcagaaaagagctgctccttcagtaaacaaat

SEQ ID NO: 12127 - RNA, 74 nt, synthetic construct
  source 1..74: mol_type = other RNA
cggtggctggaacacttggcaaaggtaacagcagcttcaggttcagaaaagagctgctccttcagtaaacaaat

SEQ ID NO: 12128 - RNA, 75 nt, synthetic construct
  source 1..75: mol_type = other RNA
ccggtggctggaacacttggcaaaggtaacagcagcttcaggttcagaaaagagctgctccttcagtaaacaaat

SEQ ID NO: 12129 - RNA, 76 nt, synthetic construct
  source 1..76: mol_type = other RNA
gccggtggctggaacacttggcaaaggtaacagcagcttcaggttcagaaaagagctgctccttcagtaaacaaat

SEQ ID NO: 12130 - RNA, 77 nt, synthetic construct
  source 1..77: mol_type = other RNA
ggccggtggctggaacacttggcaaaggtaacagcagcttcaggttcagaaaagagctgctccttcagtaaacaaat

SEQ ID NO: 12131 - RNA, 78 nt, synthetic construct
  source 1..78: mol_type = other RNA
gggccggtggctggaacacttggcaaaggtaacagcagcttcaggttcagaaaagagctgctccttcagtaaacaaat

SEQ ID NO: 12132 - RNA, 79 nt, synthetic construct
  source 1..79: mol_type = other RNA
tgggccggtggctggaacacttggcaaaggtaacagcagcttcaggttcagaaaagagctgctccttcagtaaacaaat

SEQ ID NO: 12133 - RNA, 80 nt, synthetic construct
  source 1..80: mol_type = other RNA
ctgggccggtggctggaacacttggcaaaggtaacagcagcttcaggttcagaaaagagctgctccttcagtaaacaaat

SEQ ID NO: 12134 - RNA, 81 nt, synthetic construct
  source 1..81: mol_type = other RNA
cctgggccggtggctggaacacttggcaaaggtaacagcagcttcaggttcagaaaagagctgctccttcagtaaacaaat

SEQ ID NO: 12135 - RNA, 82 nt, synthetic construct
  source 1..82: mol_type = other RNA
ccctgggccggtggctggaacacttggcaaaggtaacagcagcttcaggttcagaaaagagctgctccttcagtaaacaaat

SEQ ID NO: 12136 - RNA, 83 nt, synthetic construct
  source 1..83: mol_type = other RNA
gccctgggccggtggctggaacacttggcaaaggtaacagcagcttcaggttcagaaaagagctgctccttcagtaaacaaat

SEQ ID NO: 12137 - RNA, 84 nt, synthetic construct
  source 1..84: mol_type = other RNA
tgccctgggccggtggctggaacacttggcaaaggtaacagcagcttcaggttcagaaaagagctgctccttcagtaaacaaat

SEQ ID NO: 12138 - RNA, 85 nt, synthetic construct
  source 1..85: mol_type = other RNA
ttgccctgggccggtggctggaacacttggcaaaggtaacagcagcttcaggttcagaaaagagctgctccttcagtaaacaaat

SEQ ID NO: 12139 - RNA, 86 nt, synthetic construct
  source 1..86: mol_type = other RNA
attgccctgggccggtggctggaacacttggcaaaggtaacagcagcttcaggttcagaaaagagctgctccttcagtaaacaaat

SEQ ID NO: 12140 - RNA, 87 nt, synthetic construct
  source 1..87: mol_type = other RNA
cattgccctgggccggtggctggaacacttggcaaaggtaacagcagcttcaggttcagaaaagagctgctccttcagtaaacaaat

SEQ ID NO: 12141 - RNA, 88 nt, synthetic construct
  source 1..88: mol_type = other RNA
tcattgccctgggccggtggctggaacacttggcaaaggtaacagcagcttcaggttcagaaaagagctgctccttcagtaaacaaat

SEQ ID NO: 12142 - RNA, 89 nt, synthetic construct
  source 1..89: mol_type = other RNA
ttcattgccctgggccggtggctggaacacttggcaaaggtaacagcagcttcaggttcagaaaagagctgctccttcagtaaacaaat

SEQ ID NO: 12143 - RNA, 90 nt, synthetic construct
  source 1..90: mol_type = other RNA
gttcattgccctgggccggtggctggaacacttggcaaaggtaacagcagcttcaggttcagaaaagagctgctccttcagtaaacaaat

SEQ ID NO: 12144 - RNA, 91 nt, synthetic construct
  source 1..91: mol_type = other RNA
tgttcattgccctgggccggtggctggaacacttggcaaaggtaacagcagcttcaggttcagaaaagagctgctccttcagtaaacaaat

SEQ ID NO: 12145 - RNA, 92 nt, synthetic construct
  source 1..92: mol_type = other RNA
gtgttcattgccctgggccggtggctggaacacttggcaaaggtaacagcagcttcaggttcagaaaagagctgctccttcagtaaacaaat

SEQ ID NO: 12146 - RNA, 93 nt, synthetic construct
  source 1..93: mol_type = other RNA
tgtgttcattgccctgggccggtggctggaacacttggcaaaggtaacagcagcttcaggttcagaaaagagctgctccttcagtaaacaaat

SEQ ID NO: 12147 - RNA, 94 nt, synthetic construct
  source 1..94: mol_type = other RNA
ttgtgttcattgccctgggccggtggctggaacacttggcaaaggtaacagcagcttcaggttcagaaaagagctgctccttcagtaaacaaat

SEQ ID NO: 12148 - RNA, 95 nt, synthetic construct
  source 1..95: mol_type = other RNA
tttgtgttcattgccctgggccggtggctggaacacttggcaaaggtaacagcagcttcaggttcagaaaagagctgctccttcagtaaacaaat

SEQ ID NO: 12149 - RNA, 96 nt, synthetic construct
  source 1..96: mol_type = other RNA
ctttgtgttcattgccctgggccggtggctggaacacttggcaaaggtaacagcagcttcaggttcagaaaagagctgctccttcagtaaacaaat

SEQ ID NO: 12150 - RNA, 97 nt, synthetic construct
  source 1..97: mol_type = other RNA
tctttgtgttcattgccctgggccggtggctggaacacttggcaaaggtaacagcagcttcaggttcagaaaagagctgctccttcagtaaacaaat

SEQ ID NO: 12151 - RNA, 98 nt, synthetic construct
  source 1..98: mol_type = other RNA
ctctttgtgttcattgccctgggccggtggctggaacacttggcaaaggtaacagcagcttcaggttcagaaaagagctgctccttcagtaaacaaat

SEQ ID NO: 12152 - RNA, 99 nt, synthetic construct
  source 1..99: mol_type = other RNA
gctctttgtgttcattgccctgggccggtggctggaacacttggcaaaggtaacagcagcttcaggttcagaaaagagctgctccttcagtaaacaaat

SEQ ID NO: 12153 - RNA, 100 nt, synthetic construct
  source 1..100: mol_type = other RNA
tgctctttgtgttcattgccctgggccggtggctggaacacttggcaaaggtaacagcagcttcaggttcagaaaagagctgctccttcagtaaacaaat

SEQ ID NO: 12154 - RNA, 16 nt, synthetic construct
  source 1..16: mol_type = other RNA
atttgtttactgaagg

SEQ ID NO: 12155 - RNA, 17 nt, synthetic construct
  source 1..17: mol_type = other RNA
gatttgtttactgaagg

SEQ ID NO: 12156 - RNA, 18 nt, synthetic construct
  source 1..18: mol_type = other RNA
agatttgtttactgaagg

SEQ ID NO: 12157 - RNA, 19 nt, synthetic construct
  source 1..19: mol_type = other RNA
gagatttgtttactgaagg

SEQ ID NO: 12158 - RNA, 20 nt, synthetic construct
  source 1..20: mol_type = other RNA
tgagatttgtttactgaagg

SEQ ID NO: 12159 - RNA, 21 nt, synthetic construct
  source 1..21: mol_type = other RNA
gtgagatttgtttactgaagg

SEQ ID NO: 12160 - RNA, 22 nt, synthetic construct
  source 1..22: mol_type = other RNA
agtgagatttgtttactgaagg

SEQ ID NO: 12161-12165 - skipped (5 entries)

SEQ ID NO: 12166 - RNA, 10 nt, synthetic construct
  source 1..10: mol_type = other RNA
tcagtaaaca

SEQ ID NO: 12167 - RNA, 11 nt, synthetic construct
  source 1..11: mol_type = other RNA
tcagtaaacaa

SEQ ID NO: 12168 - RNA, 12 nt, synthetic construct
  source 1..12: mol_type = other RNA
tcagtaaacaaa

SEQ ID NO: 12169 - RNA, 13 nt, synthetic construct
  source 1..13: mol_type = other RNA
tcagtaaacaaat

SEQ ID NO: 12170 - RNA, 14 nt, synthetic construct
  source 1..14: mol_type = other RNA
tcagtaaacaaatc

SEQ ID NO: 12171 - RNA, 15 nt, synthetic construct
  source 1..15: mol_type = other RNA
tcagtaaacaaatct

SEQ ID NO: 12172 - RNA, 16 nt, synthetic construct
  source 1..16: mol_type = other RNA
tcagtaaacaaatctc

SEQ ID NO: 12173 - RNA, 17 nt, synthetic construct
  source 1..17: mol_type = other RNA
tcagtaaacaaatctca

SEQ ID NO: 12174 - RNA, 18 nt, synthetic construct
  source 1..18: mol_type = other RNA
tcagtaaacaaatctcac

SEQ ID NO: 12175 - RNA, 19 nt, synthetic construct
  source 1..19: mol_type = other RNA
tcagtaaacaaatctcact

SEQ ID NO: 12176 - RNA, 60 nt, synthetic construct
  source 1..60: mol_type = other RNA
ggtggctggaacacttggcaaaggtaacagcagcttcaggttcagaaaagagctgctcct

SEQ ID NO: 12177 - RNA, 61 nt, synthetic construct
  source 1..61: mol_type = other RNA
cggtggctggaacacttggcaaaggtaacagcagcttcaggttcagaaaagagctgctcct

SEQ ID NO: 12178 - RNA, 62 nt, synthetic construct
  source 1..62: mol_type = other RNA
ccggtggctggaacacttggcaaaggtaacagcagcttcaggttcagaaaagagctgctcct

SEQ ID NO: 12179 - RNA, 63 nt, synthetic construct
  source 1..63: mol_type = other RNA
gccggtggctggaacacttggcaaaggtaacagcagcttcaggttcagaaaagagctgctcct

SEQ ID NO: 12180 - RNA, 64 nt, synthetic construct
  source 1..64: mol_type = other RNA
ggccggtggctggaacacttggcaaaggtaacagcagcttcaggttcagaaaagagctgctcct

SEQ ID NO: 12181 - RNA, 65 nt, synthetic construct
  source 1..65: mol_type = other RNA
gggccggtggctggaacacttggcaaaggtaacagcagcttcaggttcagaaaagagctgctcct

SEQ ID NO: 12182 - RNA, 66 nt, synthetic construct
  source 1..66: mol_type = other RNA
tgggccggtggctggaacacttggcaaaggtaacagcagcttcaggttcagaaaagagctgctcct

SEQ ID NO: 12183 - RNA, 67 nt, synthetic construct
  source 1..67: mol_type = other RNA
ctgggccggtggctggaacacttggcaaaggtaacagcagcttcaggttcagaaaagagctgctcct

SEQ ID NO: 12184 - RNA, 68 nt, synthetic construct
  source 1..68: mol_type = other RNA
cctgggccggtggctggaacacttggcaaaggtaacagcagcttcaggttcagaaaagagctgctcct

SEQ ID NO: 12185 - RNA, 69 nt, synthetic construct
  source 1..69: mol_type = other RNA
ccctgggccggtggctggaacacttggcaaaggtaacagcagcttcaggttcagaaaagagctgctcct

SEQ ID NO: 12186 - RNA, 70 nt, synthetic construct
  source 1..70: mol_type = other RNA
gccctgggccggtggctggaacacttggcaaaggtaacagcagcttcaggttcagaaaagagctgctcct

SEQ ID NO: 12187 - RNA, 71 nt, synthetic construct
  source 1..71: mol_type = other RNA
tgccctgggccggtggctggaacacttggcaaaggtaacagcagcttcaggttcagaaaagagctgctcct

SEQ ID NO: 12188 - RNA, 72 nt, synthetic construct
  source 1..72: mol_type = other RNA
ttgccctgggccggtggctggaacacttggcaaaggtaacagcagcttcaggttcagaaaagagctgctcct

SEQ ID NO: 12189 - RNA, 73 nt, synthetic construct
  source 1..73: mol_type = other RNA
attgccctgggccggtggctggaacacttggcaaaggtaacagcagcttcaggttcagaaaagagctgctcct

SEQ ID NO: 12190 - RNA, 74 nt, synthetic construct
  source 1..74: mol_type = other RNA
cattgccctgggccggtggctggaacacttggcaaaggtaacagcagcttcaggttcagaaaagagctgctcct

SEQ ID NO: 12191 - RNA, 75 nt, synthetic construct
  source 1..75: mol_type = other RNA
tcattgccctgggccggtggctggaacacttggcaaaggtaacagcagcttcaggttcagaaaagagctgctcct

SEQ ID NO: 12192 - RNA, 76 nt, synthetic construct
  source 1..76: mol_type = other RNA
ttcattgccctgggccggtggctggaacacttggcaaaggtaacagcagcttcaggttcagaaaagagctgctcct

SEQ ID NO: 12193 - RNA, 77 nt, synthetic construct
  source 1..77: mol_type = other RNA
gttcattgccctgggccggtggctggaacacttggcaaaggtaacagcagcttcaggttcagaaaagagctgctcct

SEQ ID NO: 12194 - RNA, 78 nt, synthetic construct
  source 1..78: mol_type = other RNA
tgttcattgccctgggccggtggctggaacacttggcaaaggtaacagcagcttcaggttcagaaaagagctgctcct

SEQ ID NO: 12195 - RNA, 79 nt, synthetic construct
  source 1..79: mol_type = other RNA
gtgttcattgccctgggccggtggctggaacacttggcaaaggtaacagcagcttcaggttcagaaaagagctgctcct

SEQ ID NO: 12196 - RNA, 80 nt, synthetic construct
  source 1..80: mol_type = other RNA
tgtgttcattgccctgggccggtggctggaacacttggcaaaggtaacagcagcttcaggttcagaaaagagctgctcct

SEQ ID NO: 12197 - RNA, 81 nt, synthetic construct
  source 1..81: mol_type = other RNA
ttgtgttcattgccctgggccggtggctggaacacttggcaaaggtaacagcagcttcaggttcagaaaagagctgctcct

SEQ ID NO: 12198 - RNA, 82 nt, synthetic construct
  source 1..82: mol_type = other RNA
tttgtgttcattgccctgggccggtggctggaacacttggcaaaggtaacagcagcttcaggttcagaaaagagctgctcct

SEQ ID NO: 12199 - RNA, 83 nt, synthetic construct
  source 1..83: mol_type = other RNA
ctttgtgttcattgccctgggccggtggctggaacacttggcaaaggtaacagcagcttcaggttcagaaaagagctgctcct

SEQ ID NO: 12200 - RNA, 84 nt, synthetic construct
  source 1..84: mol_type = other RNA
tctttgtgttcattgccctgggccggtggctggaacacttggcaaaggtaacagcagcttcaggttcagaaaagagctgctcct

SEQ ID NO: 12201 - RNA, 85 nt, synthetic construct
  source 1..85: mol_type = other RNA
ctctttgtgttcattgccctgggccggtggctggaacacttggcaaaggtaacagcagcttcaggttcagaaaagagctgctcct

SEQ ID NO: 12202 - RNA, 86 nt, synthetic construct
  source 1..86: mol_type = other RNA
gctctttgtgttcattgccctgggccggtggctggaacacttggcaaaggtaacagcagcttcaggttcagaaaagagctgctcct

SEQ ID NO: 12203 - RNA, 87 nt, synthetic construct
  source 1..87: mol_type = other RNA
tgctctttgtgttcattgccctgggccggtggctggaacacttggcaaaggtaacagcagcttcaggttcagaaaagagctgctcct

SEQ ID NO: 12204 - RNA, 88 nt, synthetic construct
  source 1..88: mol_type = other RNA
atgctctttgtgttcattgccctgggccggtggctggaacacttggcaaaggtaacagcagcttcaggttcagaaaagagctgctcct

SEQ ID NO: 12205 - RNA, 89 nt, synthetic construct
  source 1..89: mol_type = other RNA
catgctctttgtgttcattgccctgggccggtggctggaacacttggcaaaggtaacagcagcttcaggttcagaaaagagctgctcct

SEQ ID NO: 12206 - RNA, 90 nt, synthetic construct
  source 1..90: mol_type = other RNA
ccatgctctttgtgttcattgccctgggccggtggctggaacacttggcaaaggtaacagcagcttcaggttcagaaaagagctgctcct

SEQ ID NO: 12207 - RNA, 91 nt, synthetic construct
  source 1..91: mol_type = other RNA
cccatgctctttgtgttcattgccctgggccggtggctggaacacttggcaaaggtaacagcagcttcaggttcagaaaagagctgctcct

SEQ ID NO: 12208 - RNA, 92 nt, synthetic construct
  source 1..92: mol_type = other RNA
ccccatgctctttgtgttcattgccctgggccggtggctggaacacttggcaaaggtaacagcagcttcaggttcagaaaagagctgctcct

SEQ ID NO: 12209 - RNA, 93 nt, synthetic construct
  source 1..93: mol_type = other RNA
cccccatgctctttgtgttcattgccctgggccggtggctggaacacttggcaaaggtaacagcagcttcaggttcagaaaagagctgctcct

SEQ ID NO: 12210 - RNA, 94 nt, synthetic construct
  source 1..94: mol_type = other RNA
ccccccatgctctttgtgttcattgccctgggccggtggctggaacacttggcaaaggtaacagcagcttcaggttcagaaaagagctgctcct

SEQ ID NO: 12211 - RNA, 95 nt, synthetic construct
  source 1..95: mol_type = other RNA
gccccccatgctctttgtgttcattgccctgggccggtggctggaacacttggcaaaggtaacagcagcttcaggttcagaaaagagctgctcct

SEQ ID NO: 12212 - RNA, 96 nt, synthetic construct
  source 1..96: mol_type = other RNA
cgccccccatgctctttgtgttcattgccctgggccggtggctggaacacttggcaaaggtaacagcagcttcaggttcagaaaagagctgctcct

SEQ ID NO: 12213 - RNA, 97 nt, synthetic construct
  source 1..97: mol_type = other RNA
acgccccccatgctctttgtgttcattgccctgggccggtggctggaacacttggcaaaggtaacagcagcttcaggttcagaaaagagctgctcct

SEQ ID NO: 12214 - RNA, 98 nt, synthetic construct
  source 1..98: mol_type = other RNA
cacgccccccatgctctttgtgttcattgccctgggccggtggctggaacacttggcaaaggtaacagcagcttcaggttcagaaaagagctgctcct

SEQ ID NO: 12215 - RNA, 99 nt, synthetic construct
  source 1..99: mol_type = other RNA
acacgccccccatgctctttgtgttcattgccctgggccggtggctggaacacttggcaaaggtaacagcagcttcaggttcagaaaagagctgctcct

SEQ ID NO: 12216 - RNA, 100 nt, synthetic construct
  source 1..100: mol_type = other RNA
gacacgccccccatgctctttgtgttcattgccctgggccggtggctggaacacttggcaaaggtaacagcagcttcaggttcagaaaagagctgctcct

SEQ ID NO: 12217 - RNA, 16 nt, synthetic construct
  source 1..16: mol_type = other RNA
tgtttactgaaggagc

SEQ ID NO: 12218 - RNA, 17 nt, synthetic construct
  source 1..17: mol_type = other RNA
ttgtttactgaaggagc

SEQ ID NO: 12219 - RNA, 18 nt, synthetic construct
  source 1..18: mol_type = other RNA
tttgtttactgaaggagc

SEQ ID NO: 12220 - RNA, 19 nt, synthetic construct
  source 1..19: mol_type = other RNA
atttgtttactgaaggagc

SEQ ID NO: 12221 - RNA, 20 nt, synthetic construct
  source 1..20: mol_type = other RNA
gatttgtttactgaaggagc

SEQ ID NO: 12222 - RNA, 21 nt, synthetic construct
  source 1..21: mol_type = other RNA
agatttgtttactgaaggagc

SEQ ID NO: 12223 - RNA, 22 nt, synthetic construct
  source 1..22: mol_type = other RNA
gagatttgtttactgaaggagc

SEQ ID NO: 12224-12227 - skipped (4 entries)

SEQ ID NO: 12228 - RNA, 10 nt, synthetic construct
  source 1..10: mol_type = other RNA
ccttcagtaa

SEQ ID NO: 12229 - RNA, 11 nt, synthetic construct
  source 1..11: mol_type = other RNA
ccttcagtaaa

SEQ ID NO: 12230 - RNA, 12 nt, synthetic construct
  source 1..12: mol_type = other RNA
ccttcagtaaac

SEQ ID NO: 12231 - RNA, 13 nt, synthetic construct
  source 1..13: mol_type = other RNA
ccttcagtaaaca

SEQ ID NO: 12232 - RNA, 14 nt, synthetic construct
  source 1..14: mol_type = other RNA
ccttcagtaaacaa

SEQ ID NO: 12233 - RNA, 15 nt, synthetic construct
  source 1..15: mol_type = other RNA
ccttcagtaaacaaa

SEQ ID NO: 12234 - RNA, 16 nt, synthetic construct
  source 1..16: mol_type = other RNA
ccttcagtaaacaaat

SEQ ID NO: 12235 - RNA, 17 nt, synthetic construct
  source 1..17: mol_type = other RNA
ccttcagtaaacaaatc

SEQ ID NO: 12236 - RNA, 18 nt, synthetic construct
  source 1..18: mol_type = other RNA
ccttcagtaaacaaatct

SEQ ID NO: 12237 - RNA, 19 nt, synthetic construct
  source 1..19: mol_type = other RNA
ccttcagtaaacaaatctc

SEQ ID NO: 12238 - RNA, 57 nt, synthetic construct
  source 1..57: mol_type = other RNA
ggtggctggaacacttggcaaaggtaacagcagcttcaggttcagaaaagagctgct

SEQ ID NO: 12239 - RNA, 58 nt, synthetic construct
  source 1..58: mol_type = other RNA
cggtggctggaacacttggcaaaggtaacagcagcttcaggttcagaaaagagctgct

SEQ ID NO: 12240 - RNA, 59 nt, synthetic construct
  source 1..59: mol_type = other RNA
ccggtggctggaacacttggcaaaggtaacagcagcttcaggttcagaaaagagctgct

SEQ ID NO: 12241 - RNA, 60 nt, synthetic construct
  source 1..60: mol_type = other RNA
gccggtggctggaacacttggcaaaggtaacagcagcttcaggttcagaaaagagctgct

SEQ ID NO: 12242 - RNA, 61 nt, synthetic construct
  source 1..61: mol_type = other RNA
ggccggtggctggaacacttggcaaaggtaacagcagcttcaggttcagaaaagagctgct

SEQ ID NO: 12243 - RNA, 62 nt, synthetic construct
  source 1..62: mol_type = other RNA
gggccggtggctggaacacttggcaaaggtaacagcagcttcaggttcagaaaagagctgct

SEQ ID NO: 12244 - RNA, 63 nt, synthetic construct
  source 1..63: mol_type = other RNA
tgggccggtggctggaacacttggcaaaggtaacagcagcttcaggttcagaaaagagctgct

SEQ ID NO: 12245 - RNA, 64 nt, synthetic construct
  source 1..64: mol_type = other RNA
ctgggccggtggctggaacacttggcaaaggtaacagcagcttcaggttcagaaaagagctgct

SEQ ID NO: 12246 - RNA, 65 nt, synthetic construct
  source 1..65: mol_type = other RNA
cctgggccggtggctggaacacttggcaaaggtaacagcagcttcaggttcagaaaagagctgct

SEQ ID NO: 12247 - RNA, 66 nt, synthetic construct
  source 1..66: mol_type = other RNA
ccctgggccggtggctggaacacttggcaaaggtaacagcagcttcaggttcagaaaagagctgct

SEQ ID NO: 12248 - RNA, 67 nt, synthetic construct
  source 1..67: mol_type = other RNA
gccctgggccggtggctggaacacttggcaaaggtaacagcagcttcaggttcagaaaagagctgct

SEQ ID NO: 12249 - RNA, 68 nt, synthetic construct
  source 1..68: mol_type = other RNA
tgccctgggccggtggctggaacacttggcaaaggtaacagcagcttcaggttcagaaaagagctgct

SEQ ID NO: 12250 - RNA, 69 nt, synthetic construct
  source 1..69: mol_type = other RNA
ttgccctgggccggtggctggaacacttggcaaaggtaacagcagcttcaggttcagaaaagagctgct

SEQ ID NO: 12251 - RNA, 70 nt, synthetic construct
  source 1..70: mol_type = other RNA
attgccctgggccggtggctggaacacttggcaaaggtaacagcagcttcaggttcagaaaagagctgct

SEQ ID NO: 12252 - RNA, 71 nt, synthetic construct
  source 1..71: mol_type = other RNA
cattgccctgggccggtggctggaacacttggcaaaggtaacagcagcttcaggttcagaaaagagctgct

SEQ ID NO: 12253 - RNA, 72 nt, synthetic construct
  source 1..72: mol_type = other RNA
tcattgccctgggccggtggctggaacacttggcaaaggtaacagcagcttcaggttcagaaaagagctgct

SEQ ID NO: 12254 - RNA, 73 nt, synthetic construct
  source 1..73: mol_type = other RNA
ttcattgccctgggccggtggctggaacacttggcaaaggtaacagcagcttcaggttcagaaaagagctgct

SEQ ID NO: 12255 - RNA, 74 nt, synthetic construct
  source 1..74: mol_type = other RNA
gttcattgccctgggccggtggctggaacacttggcaaaggtaacagcagcttcaggttcagaaaagagctgct

SEQ ID NO: 12256 - RNA, 75 nt, synthetic construct
  source 1..75: mol_type = other RNA
tgttcattgccctgggccggtggctggaacacttggcaaaggtaacagcagcttcaggttcagaaaagagctgct

SEQ ID NO: 12257 - RNA, 76 nt, synthetic construct
  source 1..76: mol_type = other RNA
gtgttcattgccctgggccggtggctggaacacttggcaaaggtaacagcagcttcaggttcagaaaagagctgct

SEQ ID NO: 12258 - RNA, 77 nt, synthetic construct
  source 1..77: mol_type = other RNA
tgtgttcattgccctgggccggtggctggaacacttggcaaaggtaacagcagcttcaggttcagaaaagagctgct

SEQ ID NO: 12259 - RNA, 78 nt, synthetic construct
  source 1..78: mol_type = other RNA
ttgtgttcattgccctgggccggtggctggaacacttggcaaaggtaacagcagcttcaggttcagaaaagagctgct

SEQ ID NO: 12260 - RNA, 79 nt, synthetic construct
  source 1..79: mol_type = other RNA
tttgtgttcattgccctgggccggtggctggaacacttggcaaaggtaacagcagcttcaggttcagaaaagagctgct

SEQ ID NO: 12261 - RNA, 80 nt, synthetic construct
  source 1..80: mol_type = other RNA
ctttgtgttcattgccctgggccggtggctggaacacttggcaaaggtaacagcagcttcaggttcagaaaagagctgct

SEQ ID NO: 12262 - RNA, 81 nt, synthetic construct
  source 1..81: mol_type = other RNA
tctttgtgttcattgccctgggccggtggctggaacacttggcaaaggtaacagcagcttcaggttcagaaaagagctgct

SEQ ID NO: 12263 - RNA, 82 nt, synthetic construct
  source 1..82: mol_type = other RNA
ctctttgtgttcattgccctgggccggtggctggaacacttggcaaaggtaacagcagcttcaggttcagaaaagagctgct

SEQ ID NO: 12264 - RNA, 83 nt, synthetic construct
  source 1..83: mol_type = other RNA
gctctttgtgttcattgccctgggccggtggctggaacacttggcaaaggtaacagcagcttcaggttcagaaaagagctgct

SEQ ID NO: 12265 - RNA, 84 nt, synthetic construct
  source 1..84: mol_type = other RNA
tgctctttgtgttcattgccctgggccggtggctggaacacttggcaaaggtaacagcagcttcaggttcagaaaagagctgct

SEQ ID NO: 12266 - RNA, 85 nt, synthetic construct
  source 1..85: mol_type = other RNA
atgctctttgtgttcattgccctgggccggtggctggaacacttggcaaaggtaacagcagcttcaggttcagaaaagagctgct

SEQ ID NO: 12267 - RNA, 86 nt, synthetic construct
  source 1..86: mol_type = other RNA
catgctctttgtgttcattgccctgggccggtggctggaacacttggcaaaggtaacagcagcttcaggttcagaaaagagctgct

SEQ ID NO: 12268 - RNA, 87 nt, synthetic construct
  source 1..87: mol_type = other RNA
ccatgctctttgtgttcattgccctgggccggtggctggaacacttggcaaaggtaacagcagcttcaggttcagaaaagagctgct

SEQ ID NO: 12269 - RNA, 88 nt, synthetic construct
  source 1..88: mol_type = other RNA
cccatgctctttgtgttcattgccctgggccggtggctggaacacttggcaaaggtaacagcagcttcaggttcagaaaagagctgct

SEQ ID NO: 12270 - RNA, 89 nt, synthetic construct
  source 1..89: mol_type = other RNA
ccccatgctctttgtgttcattgccctgggccggtggctggaacacttggcaaaggtaacagcagcttcaggttcagaaaagagctgct

SEQ ID NO: 12271 - RNA, 90 nt, synthetic construct
  source 1..90: mol_type = other RNA
cccccatgctctttgtgttcattgccctgggccggtggctggaacacttggcaaaggtaacagcagcttcaggttcagaaaagagctgct

SEQ ID NO: 12272 - RNA, 91 nt, synthetic construct
  source 1..91: mol_type = other RNA
ccccccatgctctttgtgttcattgccctgggccggtggctggaacacttggcaaaggtaacagcagcttcaggttcagaaaagagctgct

SEQ ID NO: 12273 - RNA, 92 nt, synthetic construct
  source 1..92: mol_type = other RNA
gccccccatgctctttgtgttcattgccctgggccggtggctggaacacttggcaaaggtaacagcagcttcaggttcagaaaagagctgct

SEQ ID NO: 12274 - RNA, 93 nt, synthetic construct
  source 1..93: mol_type = other RNA
cgccccccatgctctttgtgttcattgccctgggccggtggctggaacacttggcaaaggtaacagcagcttcaggttcagaaaagagctgct

SEQ ID NO: 12275 - RNA, 94 nt, synthetic construct
  source 1..94: mol_type = other RNA
acgccccccatgctctttgtgttcattgccctgggccggtggctggaacacttggcaaaggtaacagcagcttcaggttcagaaaagagctgct

SEQ ID NO: 12276 - RNA, 95 nt, synthetic construct
  source 1..95: mol_type = other RNA
cacgccccccatgctctttgtgttcattgccctgggccggtggctggaacacttggcaaaggtaacagcagcttcaggttcagaaaagagctgct

SEQ ID NO: 12277 - RNA, 96 nt, synthetic construct
  source 1..96: mol_type = other RNA
acacgccccccatgctctttgtgttcattgccctgggccggtggctggaacacttggcaaaggtaacagcagcttcaggttcagaaaagagctgct

SEQ ID NO: 12278 - RNA, 97 nt, synthetic construct
  source 1..97: mol_type = other RNA
gacacgccccccatgctctttgtgttcattgccctgggccggtggctggaacacttggcaaaggtaacagcagcttcaggttcagaaaagagctgct

SEQ ID NO: 12279 - RNA, 98 nt, synthetic construct
  source 1..98: mol_type = other RNA
cgacacgccccccatgctctttgtgttcattgccctgggccggtggctggaacacttggcaaaggtaacagcagcttcaggttcagaaaagagctgct

SEQ ID NO: 12280 - RNA, 99 nt, synthetic construct
  source 1..99: mol_type = other RNA
tcgacacgccccccatgctctttgtgttcattgccctgggccggtggctggaacacttggcaaaggtaacagcagcttcaggttcagaaaagagctgct

SEQ ID NO: 12281 - RNA, 100 nt, synthetic construct
  source 1..100: mol_type = other RNA
ttcgacacgccccccatgctctttgtgttcattgccctgggccggtggctggaacacttggcaaaggtaacagcagcttcaggttcagaaaagagctgct

SEQ ID NO: 12282 - RNA, 16 nt, synthetic construct
  source 1..16: mol_type = other RNA
tcttttctgaacctga

SEQ ID NO: 12283 - RNA, 17 nt, synthetic construct
  source 1..17: mol_type = other RNA
ctcttttctgaacctga

SEQ ID NO: 12284 - RNA, 18 nt, synthetic construct
  source 1..18: mol_type = other RNA
gctcttttctgaacctga

SEQ ID NO: 12285 - RNA, 19 nt, synthetic construct
  source 1..19: mol_type = other RNA
agctcttttctgaacctga

SEQ ID NO: 12286 - RNA, 20 nt, synthetic construct
  source 1..20: mol_type = other RNA
cagctcttttctgaacctga

SEQ ID NO: 12287 - RNA, 21 nt, synthetic construct
  source 1..21: mol_type = other RNA
gcagctcttttctgaacctga

SEQ ID NO: 12288 - RNA, 22 nt, synthetic construct
  source 1..22: mol_type = other RNA
agcagctcttttctgaacctga

SEQ ID NO: 12289-12295 - skipped (7 entries)

SEQ ID NO: 12296 - RNA, 10 nt, synthetic construct
  source 1..10: mol_type = other RNA
ggttcagaaa

SEQ ID NO: 12297 - RNA, 11 nt, synthetic construct
  source 1..11: mol_type = other RNA
ggttcagaaaa

SEQ ID NO: 12298 - RNA, 12 nt, synthetic construct
  source 1..12: mol_type = other RNA
ggttcagaaaag

SEQ ID NO: 12299 - RNA, 13 nt, synthetic construct
  source 1..13: mol_type = other RNA
ggttcagaaaaga

SEQ ID NO: 12300 - RNA, 14 nt, synthetic construct
  source 1..14: mol_type = other RNA
ggttcagaaaagag

SEQ ID NO: 12301 - RNA, 15 nt, synthetic construct
  source 1..15: mol_type = other RNA
ggttcagaaaagagc

SEQ ID NO: 12302 - RNA, 16 nt, synthetic construct
  source 1..16: mol_type = other RNA
ggttcagaaaagagct

SEQ ID NO: 12303 - RNA, 17 nt, synthetic construct
  source 1..17: mol_type = other RNA
ggttcagaaaagagctg

SEQ ID NO: 12304 - RNA, 18 nt, synthetic construct
  source 1..18: mol_type = other RNA
ggttcagaaaagagctgc

SEQ ID NO: 12305 - RNA, 19 nt, synthetic construct
  source 1..19: mol_type = other RNA
ggttcagaaaagagctgct

SEQ ID NO: 12306 - RNA, 38 nt, synthetic construct
  source 1..38: mol_type = other RNA
ggtggctggaacacttggcaaaggtaacagcagcttca

SEQ ID NO: 12307 - RNA, 39 nt, synthetic construct
  source 1..39: mol_type = other RNA
cggtggctggaacacttggcaaaggtaacagcagcttca

SEQ ID NO: 12308 - RNA, 40 nt, synthetic construct
  source 1..40: mol_type = other RNA
ccggtggctggaacacttggcaaaggtaacagcagcttca

SEQ ID NO: 12309 - RNA, 41 nt, synthetic construct
  source 1..41: mol_type = other RNA
gccggtggctggaacacttggcaaaggtaacagcagcttca

SEQ ID NO: 12310 - RNA, 42 nt, synthetic construct
  source 1..42: mol_type = other RNA
ggccggtggctggaacacttggcaaaggtaacagcagcttca

SEQ ID NO: 12311 - RNA, 43 nt, synthetic construct
  source 1..43: mol_type = other RNA
gggccggtggctggaacacttggcaaaggtaacagcagcttca

SEQ ID NO: 12312 - RNA, 44 nt, synthetic construct
  source 1..44: mol_type = other RNA
tgggccggtggctggaacacttggcaaaggtaacagcagcttca

SEQ ID NO: 12313 - RNA, 45 nt, synthetic construct
  source 1..45: mol_type = other RNA
ctgggccggtggctggaacacttggcaaaggtaacagcagcttca

SEQ ID NO: 12314 - RNA, 46 nt, synthetic construct
  source 1..46: mol_type = other RNA
cctgggccggtggctggaacacttggcaaaggtaacagcagcttca

SEQ ID NO: 12315 - RNA, 47 nt, synthetic construct
  source 1..47: mol_type = other RNA
ccctgggccggtggctggaacacttggcaaaggtaacagcagcttca

SEQ ID NO: 12316 - RNA, 48 nt, synthetic construct
  source 1..48: mol_type = other RNA
gccctgggccggtggctggaacacttggcaaaggtaacagcagcttca

SEQ ID NO: 12317 - RNA, 49 nt, synthetic construct
  source 1..49: mol_type = other RNA
tgccctgggccggtggctggaacacttggcaaaggtaacagcagcttca

SEQ ID NO: 12318 - RNA, 50 nt, synthetic construct
  source 1..50: mol_type = other RNA
ttgccctgggccggtggctggaacacttggcaaaggtaacagcagcttca

SEQ ID NO: 12319 - RNA, 51 nt, synthetic construct
  source 1..51: mol_type = other RNA
attgccctgggccggtggctggaacacttggcaaaggtaacagcagcttca

SEQ ID NO: 12320 - RNA, 52 nt, synthetic construct
  source 1..52: mol_type = other RNA
cattgccctgggccggtggctggaacacttggcaaaggtaacagcagcttca

SEQ ID NO: 12321 - RNA, 53 nt, synthetic construct
  source 1..53: mol_type = other RNA
tcattgccctgggccggtggctggaacacttggcaaaggtaacagcagcttca

SEQ ID NO: 12322 - RNA, 54 nt, synthetic construct
  source 1..54: mol_type = other RNA
ttcattgccctgggccggtggctggaacacttggcaaaggtaacagcagcttca

SEQ ID NO: 12323 - RNA, 55 nt, synthetic construct
  source 1..55: mol_type = other RNA
gttcattgccctgggccggtggctggaacacttggcaaaggtaacagcagcttca

SEQ ID NO: 12324 - RNA, 56 nt, synthetic construct
  source 1..56: mol_type = other RNA
tgttcattgccctgggccggtggctggaacacttggcaaaggtaacagcagcttca

SEQ ID NO: 12325 - RNA, 57 nt, synthetic construct
  source 1..57: mol_type = other RNA
gtgttcattgccctgggccggtggctggaacacttggcaaaggtaacagcagcttca

SEQ ID NO: 12326 - RNA, 58 nt, synthetic construct
  source 1..58: mol_type = other RNA
tgtgttcattgccctgggccggtggctggaacacttggcaaaggtaacagcagcttca

SEQ ID NO: 12327 - RNA, 59 nt, synthetic construct
  source 1..59: mol_type = other RNA
ttgtgttcattgccctgggccggtggctggaacacttggcaaaggtaacagcagcttca

SEQ ID NO: 12328 - RNA, 60 nt, synthetic construct
  source 1..60: mol_type = other RNA
tttgtgttcattgccctgggccggtggctggaacacttggcaaaggtaacagcagcttca

SEQ ID NO: 12329 - RNA, 61 nt, synthetic construct
  source 1..61: mol_type = other RNA
ctttgtgttcattgccctgggccggtggctggaacacttggcaaaggtaacagcagcttca

SEQ ID NO: 12330 - RNA, 62 nt, synthetic construct
  source 1..62: mol_type = other RNA
tctttgtgttcattgccctgggccggtggctggaacacttggcaaaggtaacagcagcttca

SEQ ID NO: 12331 - RNA, 63 nt, synthetic construct
  source 1..63: mol_type = other RNA
ctctttgtgttcattgccctgggccggtggctggaacacttggcaaaggtaacagcagcttca

SEQ ID NO: 12332 - RNA, 64 nt, synthetic construct
  source 1..64: mol_type = other RNA
gctctttgtgttcattgccctgggccggtggctggaacacttggcaaaggtaacagcagcttca

SEQ ID NO: 12333 - RNA, 65 nt, synthetic construct
  source 1..65: mol_type = other RNA
tgctctttgtgttcattgccctgggccggtggctggaacacttggcaaaggtaacagcagcttca

SEQ ID NO: 12334 - RNA, 66 nt, synthetic construct
  source 1..66: mol_type = other RNA
atgctctttgtgttcattgccctgggccggtggctggaacacttggcaaaggtaacagcagcttca

SEQ ID NO: 12335 - RNA, 67 nt, synthetic construct
  source 1..67: mol_type = other RNA
catgctctttgtgttcattgccctgggccggtggctggaacacttggcaaaggtaacagcagcttca

SEQ ID NO: 12336 - RNA, 68 nt, synthetic construct
  source 1..68: mol_type = other RNA
ccatgctctttgtgttcattgccctgggccggtggctggaacacttggcaaaggtaacagcagcttca

SEQ ID NO: 12337 - RNA, 69 nt, synthetic construct
  source 1..69: mol_type = other RNA
cccatgctctttgtgttcattgccctgggccggtggctggaacacttggcaaaggtaacagcagcttca

SEQ ID NO: 12338 - RNA, 70 nt, synthetic construct
  source 1..70: mol_type = other RNA
ccccatgctctttgtgttcattgccctgggccggtggctggaacacttggcaaaggtaacagcagcttca

SEQ ID NO: 12339 - RNA, 71 nt, synthetic construct
  source 1..71: mol_type = other RNA
cccccatgctctttgtgttcattgccctgggccggtggctggaacacttggcaaaggtaacagcagcttca

SEQ ID NO: 12340 - RNA, 72 nt, synthetic construct
  source 1..72: mol_type = other RNA
ccccccatgctctttgtgttcattgccctgggccggtggctggaacacttggcaaaggtaacagcagcttca

SEQ ID NO: 12341 - RNA, 73 nt, synthetic construct
  source 1..73: mol_type = other RNA
gccccccatgctctttgtgttcattgccctgggccggtggctggaacacttggcaaaggtaacagcagcttca

SEQ ID NO: 12342 - RNA, 74 nt, synthetic construct
  source 1..74: mol_type = other RNA
cgccccccatgctctttgtgttcattgccctgggccggtggctggaacacttggcaaaggtaacagcagcttca

SEQ ID NO: 12343 - RNA, 75 nt, synthetic construct
  source 1..75: mol_type = other RNA
acgccccccatgctctttgtgttcattgccctgggccggtggctggaacacttggcaaaggtaacagcagcttca

SEQ ID NO: 12344 - RNA, 76 nt, synthetic construct
  source 1..76: mol_type = other RNA
cacgccccccatgctctttgtgttcattgccctgggccggtggctggaacacttggcaaaggtaacagcagcttca

SEQ ID NO: 12345 - RNA, 77 nt, synthetic construct
  source 1..77: mol_type = other RNA
acacgccccccatgctctttgtgttcattgccctgggccggtggctggaacacttggcaaaggtaacagcagcttca

SEQ ID NO: 12346 - RNA, 78 nt, synthetic construct
  source 1..78: mol_type = other RNA
gacacgccccccatgctctttgtgttcattgccctgggccggtggctggaacacttggcaaaggtaacagcagcttca

SEQ ID NO: 12347 - RNA, 79 nt, synthetic construct
  source 1..79: mol_type = other RNA
cgacacgccccccatgctctttgtgttcattgccctgggccggtggctggaacacttggcaaaggtaacagcagcttca

SEQ ID NO: 12348 - RNA, 80 nt, synthetic construct
  source 1..80: mol_type = other RNA
tcgacacgccccccatgctctttgtgttcattgccctgggccggtggctggaacacttggcaaaggtaacagcagcttca

SEQ ID NO: 12349 - RNA, 81 nt, synthetic construct
  source 1..81: mol_type = other RNA
ttcgacacgccccccatgctctttgtgttcattgccctgggccggtggctggaacacttggcaaaggtaacagcagcttca

SEQ ID NO: 12350 - RNA, 82 nt, synthetic construct
  source 1..82: mol_type = other RNA
cttcgacacgccccccatgctctttgtgttcattgccctgggccggtggctggaacacttggcaaaggtaacagcagcttca

SEQ ID NO: 12351 - RNA, 83 nt, synthetic construct
  source 1..83: mol_type = other RNA
tcttcgacacgccccccatgctctttgtgttcattgccctgggccggtggctggaacacttggcaaaggtaacagcagcttca

SEQ ID NO: 12352 - RNA, 84 nt, synthetic construct
  source 1..84: mol_type = other RNA
ttcttcgacacgccccccatgctctttgtgttcattgccctgggccggtggctggaacacttggcaaaggtaacagcagcttca

SEQ ID NO: 12353 - RNA, 85 nt, synthetic construct
  source 1..85: mol_type = other RNA
attcttcgacacgccccccatgctctttgtgttcattgccctgggccggtggctggaacacttggcaaaggtaacagcagcttca

SEQ ID NO: 12354 - RNA, 86 nt, synthetic construct
  source 1..86: mol_type = other RNA
cattcttcgacacgccccccatgctctttgtgttcattgccctgggccggtggctggaacacttggcaaaggtaacagcagcttca

SEQ ID NO: 12355 - RNA, 87 nt, synthetic construct
  source 1..87: mol_type = other RNA
acattcttcgacacgccccccatgctctttgtgttcattgccctgggccggtggctggaacacttggcaaaggtaacagcagcttca

SEQ ID NO: 12356 - RNA, 88 nt, synthetic construct
  source 1..88: mol_type = other RNA
gacattcttcgacacgccccccatgctctttgtgttcattgccctgggccggtggctggaacacttggcaaaggtaacagcagcttca

SEQ ID NO: 12357 - RNA, 89 nt, synthetic construct
  source 1..89: mol_type = other RNA
tgacattcttcgacacgccccccatgctctttgtgttcattgccctgggccggtggctggaacacttggcaaaggtaacagcagcttca

SEQ ID NO: 12358 - RNA, 90 nt, synthetic construct
  source 1..90: mol_type = other RNA
gtgacattcttcgacacgccccccatgctctttgtgttcattgccctgggccggtggctggaacacttggcaaaggtaacagcagcttca

SEQ ID NO: 12359 - RNA, 91 nt, synthetic construct
  source 1..91: mol_type = other RNA
tgtgacattcttcgacacgccccccatgctctttgtgttcattgccctgggccggtggctggaacacttggcaaaggtaacagcagcttca

SEQ ID NO: 12360 - RNA, 92 nt, synthetic construct
  source 1..92: mol_type = other RNA
ctgtgacattcttcgacacgccccccatgctctttgtgttcattgccctgggccggtggctggaacacttggcaaaggtaacagcagcttca

SEQ ID NO: 12361 - RNA, 93 nt, synthetic construct
  source 1..93: mol_type = other RNA
cctgtgacattcttcgacacgccccccatgctctttgtgttcattgccctgggccggtggctggaacacttggcaaaggtaacagcagcttca

SEQ ID NO: 12362 - RNA, 94 nt, synthetic construct
  source 1..94: mol_type = other RNA
ccctgtgacattcttcgacacgccccccatgctctttgtgttcattgccctgggccggtggctggaacacttggcaaaggtaacagcagcttca

SEQ ID NO: 12363 - RNA, 95 nt, synthetic construct
  source 1..95: mol_type = other RNA
gccctgtgacattcttcgacacgccccccatgctctttgtgttcattgccctgggccggtggctggaacacttggcaaaggtaacagcagcttca

SEQ ID NO: 12364 - RNA, 96 nt, synthetic construct
  source 1..96: mol_type = other RNA
agccctgtgacattcttcgacacgccccccatgctctttgtgttcattgccctgggccggtggctggaacacttggcaaaggtaacagcagcttca

SEQ ID NO: 12365 - RNA, 97 nt, synthetic construct
  source 1..97: mol_type = other RNA
gagccctgtgacattcttcgacacgccccccatgctctttgtgttcattgccctgggccggtggctggaacacttggcaaaggtaacagcagcttca

SEQ ID NO: 12366 - RNA, 98 nt, synthetic construct
  source 1..98: mol_type = other RNA
ggagccctgtgacattcttcgacacgccccccatgctctttgtgttcattgccctgggccggtggctggaacacttggcaaaggtaacagcagcttca

SEQ ID NO: 12367 - RNA, 99 nt, synthetic construct
  source 1..99: mol_type = other RNA
aggagccctgtgacattcttcgacacgccccccatgctctttgtgttcattgccctgggccggtggctggaacacttggcaaaggtaacagcagcttca

SEQ ID NO: 12368 - RNA, 100 nt, synthetic construct
  source 1..100: mol_type = other RNA
gaggagccctgtgacattcttcgacacgccccccatgctctttgtgttcattgccctgggccggtggctggaacacttggcaaaggtaacagcagcttca

SEQ ID NO: 12369 - RNA, 16 nt, synthetic construct
  source 1..16: mol_type = other RNA
tttctgaacctgaagc

SEQ ID NO: 12370 - RNA, 17 nt, synthetic construct
  source 1..17: mol_type = other RNA
ttttctgaacctgaagc

SEQ ID NO: 12371 - RNA, 18 nt, synthetic construct
  source 1..18: mol_type = other RNA
cttttctgaacctgaagc

SEQ ID NO: 12372 - RNA, 19 nt, synthetic construct
  source 1..19: mol_type = other RNA
tcttttctgaacctgaagc

SEQ ID NO: 12373 - RNA, 20 nt, synthetic construct
  source 1..20: mol_type = other RNA
ctcttttctgaacctgaagc

SEQ ID NO: 12374 - RNA, 21 nt, synthetic construct
  source 1..21: mol_type = other RNA
gctcttttctgaacctgaagc

SEQ ID NO: 12375 - RNA, 22 nt, synthetic construct
  source 1..22: mol_type = other RNA
agctcttttctgaacctgaagc

SEQ ID NO: 12376-12380 - skipped (5 entries)

SEQ ID NO: 12381 - RNA, 10 nt, synthetic construct
  source 1..10: mol_type = other RNA
tcaggttcag

SEQ ID NO: 12382 - RNA, 11 nt, synthetic construct
  source 1..11: mol_type = other RNA
tcaggttcaga

SEQ ID NO: 12383 - RNA, 12 nt, synthetic construct
  source 1..12: mol_type = other RNA
tcaggttcagaa

SEQ ID NO: 12384 - RNA, 13 nt, synthetic construct
  source 1..13: mol_type = other RNA
tcaggttcagaaa

SEQ ID NO: 12385 - RNA, 14 nt, synthetic construct
  source 1..14: mol_type = other RNA
tcaggttcagaaaa

SEQ ID NO: 12386 - RNA, 15 nt, synthetic construct
  source 1..15: mol_type = other RNA
tcaggttcagaaaag

SEQ ID NO: 12387 - RNA, 16 nt, synthetic construct
  source 1..16: mol_type = other RNA
tcaggttcagaaaaga

SEQ ID NO: 12388 - RNA, 17 nt, synthetic construct
  source 1..17: mol_type = other RNA
tcaggttcagaaaagag

SEQ ID NO: 12389 - RNA, 18 nt, synthetic construct
  source 1..18: mol_type = other RNA
tcaggttcagaaaagagc

SEQ ID NO: 12390 - RNA, 19 nt, synthetic construct
  source 1..19: mol_type = other RNA
tcaggttcagaaaagagct

SEQ ID NO: 12391 - RNA, 35 nt, synthetic construct
  source 1..35: mol_type = other RNA
ggtggctggaacacttggcaaaggtaacagcagct

SEQ ID NO: 12392 - RNA, 36 nt, synthetic construct
  source 1..36: mol_type = other RNA
cggtggctggaacacttggcaaaggtaacagcagct

SEQ ID NO: 12393 - RNA, 37 nt, synthetic construct
  source 1..37: mol_type = other RNA
ccggtggctggaacacttggcaaaggtaacagcagct

SEQ ID NO: 12394 - RNA, 38 nt, synthetic construct
  source 1..38: mol_type = other RNA
gccggtggctggaacacttggcaaaggtaacagcagct

SEQ ID NO: 12395 - RNA, 39 nt, synthetic construct
  source 1..39: mol_type = other RNA
ggccggtggctggaacacttggcaaaggtaacagcagct

SEQ ID NO: 12396 - RNA, 40 nt, synthetic construct
  source 1..40: mol_type = other RNA
gggccggtggctggaacacttggcaaaggtaacagcagct

SEQ ID NO: 12397 - RNA, 41 nt, synthetic construct
  source 1..41: mol_type = other RNA
tgggccggtggctggaacacttggcaaaggtaacagcagct

SEQ ID NO: 12398 - RNA, 42 nt, synthetic construct
  source 1..42: mol_type = other RNA
ctgggccggtggctggaacacttggcaaaggtaacagcagct

SEQ ID NO: 12399 - RNA, 43 nt, synthetic construct
  source 1..43: mol_type = other RNA
cctgggccggtggctggaacacttggcaaaggtaacagcagct

SEQ ID NO: 12400 - RNA, 44 nt, synthetic construct
  source 1..44: mol_type = other RNA
ccctgggccggtggctggaacacttggcaaaggtaacagcagct

SEQ ID NO: 12401 - RNA, 45 nt, synthetic construct
  source 1..45: mol_type = other RNA
gccctgggccggtggctggaacacttggcaaaggtaacagcagct

SEQ ID NO: 12402 - RNA, 46 nt, synthetic construct
  source 1..46: mol_type = other RNA
tgccctgggccggtggctggaacacttggcaaaggtaacagcagct

SEQ ID NO: 12403 - RNA, 47 nt, synthetic construct
  source 1..47: mol_type = other RNA
ttgccctgggccggtggctggaacacttggcaaaggtaacagcagct

SEQ ID NO: 12404 - RNA, 48 nt, synthetic construct
  source 1..48: mol_type = other RNA
attgccctgggccggtggctggaacacttggcaaaggtaacagcagct

SEQ ID NO: 12405 - RNA, 49 nt, synthetic construct
  source 1..49: mol_type = other RNA
cattgccctgggccggtggctggaacacttggcaaaggtaacagcagct

SEQ ID NO: 12406 - RNA, 50 nt, synthetic construct
  source 1..50: mol_type = other RNA
tcattgccctgggccggtggctggaacacttggcaaaggtaacagcagct

SEQ ID NO: 12407 - RNA, 51 nt, synthetic construct
  source 1..51: mol_type = other RNA
ttcattgccctgggccggtggctggaacacttggcaaaggtaacagcagct

SEQ ID NO: 12408 - RNA, 52 nt, synthetic construct
  source 1..52: mol_type = other RNA
gttcattgccctgggccggtggctggaacacttggcaaaggtaacagcagct

SEQ ID NO: 12409 - RNA, 53 nt, synthetic construct
  source 1..53: mol_type = other RNA
tgttcattgccctgggccggtggctggaacacttggcaaaggtaacagcagct

SEQ ID NO: 12410 - RNA, 54 nt, synthetic construct
  source 1..54: mol_type = other RNA
gtgttcattgccctgggccggtggctggaacacttggcaaaggtaacagcagct

SEQ ID NO: 12411 - RNA, 55 nt, synthetic construct
  source 1..55: mol_type = other RNA
tgtgttcattgccctgggccggtggctggaacacttggcaaaggtaacagcagct

SEQ ID NO: 12412 - RNA, 56 nt, synthetic construct
  source 1..56: mol_type = other RNA
ttgtgttcattgccctgggccggtggctggaacacttggcaaaggtaacagcagct

SEQ ID NO: 12413 - RNA, 57 nt, synthetic construct
  source 1..57: mol_type = other RNA
tttgtgttcattgccctgggccggtggctggaacacttggcaaaggtaacagcagct

SEQ ID NO: 12414 - RNA, 58 nt, synthetic construct
  source 1..58: mol_type = other RNA
ctttgtgttcattgccctgggccggtggctggaacacttggcaaaggtaacagcagct

SEQ ID NO: 12415 - RNA, 59 nt, synthetic construct
  source 1..59: mol_type = other RNA
tctttgtgttcattgccctgggccggtggctggaacacttggcaaaggtaacagcagct

SEQ ID NO: 12416 - RNA, 60 nt, synthetic construct
  source 1..60: mol_type = other RNA
ctctttgtgttcattgccctgggccggtggctggaacacttggcaaaggtaacagcagct

SEQ ID NO: 12417 - RNA, 61 nt, synthetic construct
  source 1..61: mol_type = other RNA
gctctttgtgttcattgccctgggccggtggctggaacacttggcaaaggtaacagcagct

SEQ ID NO: 12418 - RNA, 62 nt, synthetic construct
  source 1..62: mol_type = other RNA
tgctctttgtgttcattgccctgggccggtggctggaacacttggcaaaggtaacagcagct

SEQ ID NO: 12419 - RNA, 63 nt, synthetic construct
  source 1..63: mol_type = other RNA
atgctctttgtgttcattgccctgggccggtggctggaacacttggcaaaggtaacagcagct

SEQ ID NO: 12420 - RNA, 64 nt, synthetic construct
  source 1..64: mol_type = other RNA
catgctctttgtgttcattgccctgggccggtggctggaacacttggcaaaggtaacagcagct

SEQ ID NO: 12421 - RNA, 65 nt, synthetic construct
  source 1..65: mol_type = other RNA
ccatgctctttgtgttcattgccctgggccggtggctggaacacttggcaaaggtaacagcagct

SEQ ID NO: 12422 - RNA, 66 nt, synthetic construct
  source 1..66: mol_type = other RNA
cccatgctctttgtgttcattgccctgggccggtggctggaacacttggcaaaggtaacagcagct

SEQ ID NO: 12423 - RNA, 67 nt, synthetic construct
  source 1..67: mol_type = other RNA
ccccatgctctttgtgttcattgccctgggccggtggctggaacacttggcaaaggtaacagcagct

SEQ ID NO: 12424 - RNA, 68 nt, synthetic construct
  source 1..68: mol_type = other RNA
cccccatgctctttgtgttcattgccctgggccggtggctggaacacttggcaaaggtaacagcagct

SEQ ID NO: 12425 - RNA, 69 nt, synthetic construct
  source 1..69: mol_type = other RNA
ccccccatgctctttgtgttcattgccctgggccggtggctggaacacttggcaaaggtaacagcagct

SEQ ID NO: 12426 - RNA, 70 nt, synthetic construct
  source 1..70: mol_type = other RNA
gccccccatgctctttgtgttcattgccctgggccggtggctggaacacttggcaaaggtaacagcagct

SEQ ID NO: 12427 - RNA, 71 nt, synthetic construct
  source 1..71: mol_type = other RNA
cgccccccatgctctttgtgttcattgccctgggccggtggctggaacacttggcaaaggtaacagcagct

SEQ ID NO: 12428 - RNA, 72 nt, synthetic construct
  source 1..72: mol_type = other RNA
acgccccccatgctctttgtgttcattgccctgggccggtggctggaacacttggcaaaggtaacagcagct

SEQ ID NO: 12429 - RNA, 73 nt, synthetic construct
  source 1..73: mol_type = other RNA
cacgccccccatgctctttgtgttcattgccctgggccggtggctggaacacttggcaaaggtaacagcagct

SEQ ID NO: 12430 - RNA, 74 nt, synthetic construct
  source 1..74: mol_type = other RNA
acacgccccccatgctctttgtgttcattgccctgggccggtggctggaacacttggcaaaggtaacagcagct

SEQ ID NO: 12431 - RNA, 75 nt, synthetic construct
  source 1..75: mol_type = other RNA
gacacgccccccatgctctttgtgttcattgccctgggccggtggctggaacacttggcaaaggtaacagcagct

SEQ ID NO: 12432 - RNA, 76 nt, synthetic construct
  source 1..76: mol_type = other RNA
cgacacgccccccatgctctttgtgttcattgccctgggccggtggctggaacacttggcaaaggtaacagcagct

SEQ ID NO: 12433 - RNA, 77 nt, synthetic construct
  source 1..77: mol_type = other RNA
tcgacacgccccccatgctctttgtgttcattgccctgggccggtggctggaacacttggcaaaggtaacagcagct

SEQ ID NO: 12434 - RNA, 78 nt, synthetic construct
  source 1..78: mol_type = other RNA
ttcgacacgccccccatgctctttgtgttcattgccctgggccggtggctggaacacttggcaaaggtaacagcagct

SEQ ID NO: 12435 - RNA, 79 nt, synthetic construct
  source 1..79: mol_type = other RNA
cttcgacacgccccccatgctctttgtgttcattgccctgggccggtggctggaacacttggcaaaggtaacagcagct

SEQ ID NO: 12436 - RNA, 80 nt, synthetic construct
  source 1..80: mol_type = other RNA
tcttcgacacgccccccatgctctttgtgttcattgccctgggccggtggctggaacacttggcaaaggtaacagcagct

SEQ ID NO: 12437 - RNA, 81 nt, synthetic construct
  source 1..81: mol_type = other RNA
ttcttcgacacgccccccatgctctttgtgttcattgccctgggccggtggctggaacacttggcaaaggtaacagcagct

SEQ ID NO: 12438 - RNA, 82 nt, synthetic construct
  source 1..82: mol_type = other RNA
attcttcgacacgccccccatgctctttgtgttcattgccctgggccggtggctggaacacttggcaaaggtaacagcagct

SEQ ID NO: 12439 - RNA, 83 nt, synthetic construct
  source 1..83: mol_type = other RNA
cattcttcgacacgccccccatgctctttgtgttcattgccctgggccggtggctggaacacttggcaaaggtaacagcagct

SEQ ID NO: 12440 - RNA, 84 nt, synthetic construct
  source 1..84: mol_type = other RNA
acattcttcgacacgccccccatgctctttgtgttcattgccctgggccggtggctggaacacttggcaaaggtaacagcagct

SEQ ID NO: 12441 - RNA, 85 nt, synthetic construct
  source 1..85: mol_type = other RNA
gacattcttcgacacgccccccatgctctttgtgttcattgccctgggccggtggctggaacacttggcaaaggtaacagcagct

SEQ ID NO: 12442 - RNA, 86 nt, synthetic construct
  source 1..86: mol_type = other RNA
tgacattcttcgacacgccccccatgctctttgtgttcattgccctgggccggtggctggaacacttggcaaaggtaacagcagct

SEQ ID NO: 12443 - RNA, 87 nt, synthetic construct
  source 1..87: mol_type = other RNA
gtgacattcttcgacacgccccccatgctctttgtgttcattgccctgggccggtggctggaacacttggcaaaggtaacagcagct

SEQ ID NO: 12444 - RNA, 88 nt, synthetic construct
  source 1..88: mol_type = other RNA
tgtgacattcttcgacacgccccccatgctctttgtgttcattgccctgggccggtggctggaacacttggcaaaggtaacagcagct

SEQ ID NO: 12445 - RNA, 89 nt, synthetic construct
  source 1..89: mol_type = other RNA
ctgtgacattcttcgacacgccccccatgctctttgtgttcattgccctgggccggtggctggaacacttggcaaaggtaacagcagct

SEQ ID NO: 12446 - RNA, 90 nt, synthetic construct
  source 1..90: mol_type = other RNA
cctgtgacattcttcgacacgccccccatgctctttgtgttcattgccctgggccggtggctggaacacttggcaaaggtaacagcagct

SEQ ID NO: 12447 - RNA, 91 nt, synthetic construct
  source 1..91: mol_type = other RNA
ccctgtgacattcttcgacacgccccccatgctctttgtgttcattgccctgggccggtggctggaacacttggcaaaggtaacagcagct

SEQ ID NO: 12448 - RNA, 92 nt, synthetic construct
  source 1..92: mol_type = other RNA
gccctgtgacattcttcgacacgccccccatgctctttgtgttcattgccctgggccggtggctggaacacttggcaaaggtaacagcagct

SEQ ID NO: 12449 - RNA, 93 nt, synthetic construct
  source 1..93: mol_type = other RNA
agccctgtgacattcttcgacacgccccccatgctctttgtgttcattgccctgggccggtggctggaacacttggcaaaggtaacagcagct

SEQ ID NO: 12450 - RNA, 94 nt, synthetic construct
  source 1..94: mol_type = other RNA
gagccctgtgacattcttcgacacgccccccatgctctttgtgttcattgccctgggccggtggctggaacacttggcaaaggtaacagcagct

SEQ ID NO: 12451 - RNA, 95 nt, synthetic construct
  source 1..95: mol_type = other RNA
ggagccctgtgacattcttcgacacgccccccatgctctttgtgttcattgccctgggccggtggctggaacacttggcaaaggtaacagcagct

SEQ ID NO: 12452 - RNA, 96 nt, synthetic construct
  source 1..96: mol_type = other RNA
aggagccctgtgacattcttcgacacgccccccatgctctttgtgttcattgccctgggccggtggctggaacacttggcaaaggtaacagcagct

SEQ ID NO: 12453 - RNA, 97 nt, synthetic construct
  source 1..97: mol_type = other RNA
gaggagccctgtgacattcttcgacacgccccccatgctctttgtgttcattgccctgggccggtggctggaacacttggcaaaggtaacagcagct

SEQ ID NO: 12454 - RNA, 98 nt, synthetic construct
  source 1..98: mol_type = other RNA
agaggagccctgtgacattcttcgacacgccccccatgctctttgtgttcattgccctgggccggtggctggaacacttggcaaaggtaacagcagct

SEQ ID NO: 12455 - RNA, 99 nt, synthetic construct
  source 1..99: mol_type = other RNA
gagaggagccctgtgacattcttcgacacgccccccatgctctttgtgttcattgccctgggccggtggctggaacacttggcaaaggtaacagcagct

SEQ ID NO: 12456 - RNA, 100 nt, synthetic construct
  source 1..100: mol_type = other RNA
ggagaggagccctgtgacattcttcgacacgccccccatgctctttgtgttcattgccctgggccggtggctggaacacttggcaaaggtaacagcagct

SEQ ID NO: 12457 - RNA, 16 nt, synthetic construct
  source 1..16: mol_type = other RNA
ctgaacctgaagctgc

SEQ ID NO: 12458 - RNA, 17 nt, synthetic construct
  source 1..17: mol_type = other RNA
tctgaacctgaagctgc

SEQ ID NO: 12459 - RNA, 18 nt, synthetic construct
  source 1..18: mol_type = other RNA
ttctgaacctgaagctgc

SEQ ID NO: 12460 - RNA, 19 nt, synthetic construct
  source 1..19: mol_type = other RNA
tttctgaacctgaagctgc

SEQ ID NO: 12461 - RNA, 20 nt, synthetic construct
  source 1..20: mol_type = other RNA
ttttctgaacctgaagctgc

SEQ ID NO: 12462 - RNA, 21 nt, synthetic construct
  source 1..21: mol_type = other RNA
cttttctgaacctgaagctgc

SEQ ID NO: 12463 - RNA, 22 nt, synthetic construct
  source 1..22: mol_type = other RNA
tcttttctgaacctgaagctgc

SEQ ID NO: 12464-12469 - skipped (6 entries)

SEQ ID NO: 12470 - RNA, 10 nt, synthetic construct
  source 1..10: mol_type = other RNA
gcttcaggtt

SEQ ID NO: 12471 - RNA, 11 nt, synthetic construct
  source 1..11: mol_type = other RNA
gcttcaggttc

SEQ ID NO: 12472 - RNA, 12 nt, synthetic construct
  source 1..12: mol_type = other RNA
gcttcaggttca

SEQ ID NO: 12473 - RNA, 13 nt, synthetic construct
  source 1..13: mol_type = other RNA
gcttcaggttcag

SEQ ID NO: 12474 - RNA, 14 nt, synthetic construct
  source 1..14: mol_type = other RNA
gcttcaggttcaga

SEQ ID NO: 12475 - RNA, 15 nt, synthetic construct
  source 1..15: mol_type = other RNA
gcttcaggttcagaa

SEQ ID NO: 12476 - RNA, 16 nt, synthetic construct
  source 1..16: mol_type = other RNA
gcttcaggttcagaaa

SEQ ID NO: 12477 - RNA, 17 nt, synthetic construct
  source 1..17: mol_type = other RNA
gcttcaggttcagaaaa

SEQ ID NO: 12478 - RNA, 18 nt, synthetic construct
  source 1..18: mol_type = other RNA
gcttcaggttcagaaaag

SEQ ID NO: 12479 - RNA, 19 nt, synthetic construct
  source 1..19: mol_type = other RNA
gcttcaggttcagaaaaga

SEQ ID NO: 12480 - RNA, 32 nt, synthetic construct
  source 1..32: mol_type = other RNA
ggtggctggaacacttggcaaaggtaacagca

SEQ ID NO: 12481 - RNA, 33 nt, synthetic construct
  source 1..33: mol_type = other RNA
cggtggctggaacacttggcaaaggtaacagca

SEQ ID NO: 12482 - RNA, 34 nt, synthetic construct
  source 1..34: mol_type = other RNA
ccggtggctggaacacttggcaaaggtaacagca

SEQ ID NO: 12483 - RNA, 35 nt, synthetic construct
  source 1..35: mol_type = other RNA
gccggtggctggaacacttggcaaaggtaacagca

SEQ ID NO: 12484 - RNA, 36 nt, synthetic construct
  source 1..36: mol_type = other RNA
ggccggtggctggaacacttggcaaaggtaacagca

SEQ ID NO: 12485 - RNA, 37 nt, synthetic construct
  source 1..37: mol_type = other RNA
gggccggtggctggaacacttggcaaaggtaacagca

SEQ ID NO: 12486 - RNA, 38 nt, synthetic construct
  source 1..38: mol_type = other RNA
tgggccggtggctggaacacttggcaaaggtaacagca

SEQ ID NO: 12487 - RNA, 39 nt, synthetic construct
  source 1..39: mol_type = other RNA
ctgggccggtggctggaacacttggcaaaggtaacagca

SEQ ID NO: 12488 - RNA, 40 nt, synthetic construct
  source 1..40: mol_type = other RNA
cctgggccggtggctggaacacttggcaaaggtaacagca

SEQ ID NO: 12489 - RNA, 41 nt, synthetic construct
  source 1..41: mol_type = other RNA
ccctgggccggtggctggaacacttggcaaaggtaacagca

SEQ ID NO: 12490 - RNA, 42 nt, synthetic construct
  source 1..42: mol_type = other RNA
gccctgggccggtggctggaacacttggcaaaggtaacagca

SEQ ID NO: 12491 - RNA, 43 nt, synthetic construct
  source 1..43: mol_type = other RNA
tgccctgggccggtggctggaacacttggcaaaggtaacagca

SEQ ID NO: 12492 - RNA, 44 nt, synthetic construct
  source 1..44: mol_type = other RNA
ttgccctgggccggtggctggaacacttggcaaaggtaacagca

SEQ ID NO: 12493 - RNA, 45 nt, synthetic construct
  source 1..45: mol_type = other RNA
attgccctgggccggtggctggaacacttggcaaaggtaacagca

SEQ ID NO: 12494 - RNA, 46 nt, synthetic construct
  source 1..46: mol_type = other RNA
cattgccctgggccggtggctggaacacttggcaaaggtaacagca

SEQ ID NO: 12495 - RNA, 47 nt, synthetic construct
  source 1..47: mol_type = other RNA
tcattgccctgggccggtggctggaacacttggcaaaggtaacagca

SEQ ID NO: 12496 - RNA, 48 nt, synthetic construct
  source 1..48: mol_type = other RNA
ttcattgccctgggccggtggctggaacacttggcaaaggtaacagca

SEQ ID NO: 12497 - RNA, 49 nt, synthetic construct
  source 1..49: mol_type = other RNA
gttcattgccctgggccggtggctggaacacttggcaaaggtaacagca

SEQ ID NO: 12498 - RNA, 50 nt, synthetic construct
  source 1..50: mol_type = other RNA
tgttcattgccctgggccggtggctggaacacttggcaaaggtaacagca

SEQ ID NO: 12499 - RNA, 51 nt, synthetic construct
  source 1..51: mol_type = other RNA
gtgttcattgccctgggccggtggctggaacacttggcaaaggtaacagca

SEQ ID NO: 12500 - RNA, 52 nt, synthetic construct
  source 1..52: mol_type = other RNA
tgtgttcattgccctgggccggtggctggaacacttggcaaaggtaacagca

SEQ ID NO: 12501 - RNA, 53 nt, synthetic construct
  source 1..53: mol_type = other RNA
ttgtgttcattgccctgggccggtggctggaacacttggcaaaggtaacagca

SEQ ID NO: 12502 - RNA, 54 nt, synthetic construct
  source 1..54: mol_type = other RNA
tttgtgttcattgccctgggccggtggctggaacacttggcaaaggtaacagca

SEQ ID NO: 12503 - RNA, 55 nt, synthetic construct
  source 1..55: mol_type = other RNA
ctttgtgttcattgccctgggccggtggctggaacacttggcaaaggtaacagca

SEQ ID NO: 12504 - RNA, 56 nt, synthetic construct
  source 1..56: mol_type = other RNA
tctttgtgttcattgccctgggccggtggctggaacacttggcaaaggtaacagca

SEQ ID NO: 12505 - RNA, 57 nt, synthetic construct
  source 1..57: mol_type = other RNA
ctctttgtgttcattgccctgggccggtggctggaacacttggcaaaggtaacagca

SEQ ID NO: 12506 - RNA, 58 nt, synthetic construct
  source 1..58: mol_type = other RNA
gctctttgtgttcattgccctgggccggtggctggaacacttggcaaaggtaacagca

SEQ ID NO: 12507 - RNA, 59 nt, synthetic construct
  source 1..59: mol_type = other RNA
tgctctttgtgttcattgccctgggccggtggctggaacacttggcaaaggtaacagca

SEQ ID NO: 12508 - RNA, 60 nt, synthetic construct
  source 1..60: mol_type = other RNA
atgctctttgtgttcattgccctgggccggtggctggaacacttggcaaaggtaacagca

SEQ ID NO: 12509 - RNA, 61 nt, synthetic construct
  source 1..61: mol_type = other RNA
catgctctttgtgttcattgccctgggccggtggctggaacacttggcaaaggtaacagca

SEQ ID NO: 12510 - RNA, 62 nt, synthetic construct
  source 1..62: mol_type = other RNA
ccatgctctttgtgttcattgccctgggccggtggctggaacacttggcaaaggtaacagca

SEQ ID NO: 12511 - RNA, 63 nt, synthetic construct
  source 1..63: mol_type = other RNA
cccatgctctttgtgttcattgccctgggccggtggctggaacacttggcaaaggtaacagca

SEQ ID NO: 12512 - RNA, 64 nt, synthetic construct
  source 1..64: mol_type = other RNA
ccccatgctctttgtgttcattgccctgggccggtggctggaacacttggcaaaggtaacagca

SEQ ID NO: 12513 - RNA, 65 nt, synthetic construct
  source 1..65: mol_type = other RNA
cccccatgctctttgtgttcattgccctgggccggtggctggaacacttggcaaaggtaacagca

SEQ ID NO: 12514 - RNA, 66 nt, synthetic construct
  source 1..66: mol_type = other RNA
ccccccatgctctttgtgttcattgccctgggccggtggctggaacacttggcaaaggtaacagca

SEQ ID NO: 12515 - RNA, 67 nt, synthetic construct
  source 1..67: mol_type = other RNA
gccccccatgctctttgtgttcattgccctgggccggtggctggaacacttggcaaaggtaacagca

SEQ ID NO: 12516 - RNA, 68 nt, synthetic construct
  source 1..68: mol_type = other RNA
cgccccccatgctctttgtgttcattgccctgggccggtggctggaacacttggcaaaggtaacagca

SEQ ID NO: 12517 - RNA, 69 nt, synthetic construct
  source 1..69: mol_type = other RNA
acgccccccatgctctttgtgttcattgccctgggccggtggctggaacacttggcaaaggtaacagca

SEQ ID NO: 12518 - RNA, 70 nt, synthetic construct
  source 1..70: mol_type = other RNA
cacgccccccatgctctttgtgttcattgccctgggccggtggctggaacacttggcaaaggtaacagca

SEQ ID NO: 12519 - RNA, 71 nt, synthetic construct
  source 1..71: mol_type = other RNA
acacgccccccatgctctttgtgttcattgccctgggccggtggctggaacacttggcaaaggtaacagca

SEQ ID NO: 12520 - RNA, 72 nt, synthetic construct
  source 1..72: mol_type = other RNA
gacacgccccccatgctctttgtgttcattgccctgggccggtggctggaacacttggcaaaggtaacagca

SEQ ID NO: 12521 - RNA, 73 nt, synthetic construct
  source 1..73: mol_type = other RNA
cgacacgccccccatgctctttgtgttcattgccctgggccggtggctggaacacttggcaaaggtaacagca

SEQ ID NO: 12522 - RNA, 74 nt, synthetic construct
  source 1..74: mol_type = other RNA
tcgacacgccccccatgctctttgtgttcattgccctgggccggtggctggaacacttggcaaaggtaacagca

SEQ ID NO: 12523 - RNA, 75 nt, synthetic construct
  source 1..75: mol_type = other RNA
ttcgacacgccccccatgctctttgtgttcattgccctgggccggtggctggaacacttggcaaaggtaacagca

SEQ ID NO: 12524 - RNA, 76 nt, synthetic construct
  source 1..76: mol_type = other RNA
cttcgacacgccccccatgctctttgtgttcattgccctgggccggtggctggaacacttggcaaaggtaacagca

SEQ ID NO: 12525 - RNA, 77 nt, synthetic construct
  source 1..77: mol_type = other RNA
tcttcgacacgccccccatgctctttgtgttcattgccctgggccggtggctggaacacttggcaaaggtaacagca

SEQ ID NO: 12526 - RNA, 78 nt, synthetic construct
  source 1..78: mol_type = other RNA
ttcttcgacacgccccccatgctctttgtgttcattgccctgggccggtggctggaacacttggcaaaggtaacagca

SEQ ID NO: 12527 - RNA, 79 nt, synthetic construct
  source 1..79: mol_type = other RNA
attcttcgacacgccccccatgctctttgtgttcattgccctgggccggtggctggaacacttggcaaaggtaacagca

SEQ ID NO: 12528 - RNA, 80 nt, synthetic construct
  source 1..80: mol_type = other RNA
cattcttcgacacgccccccatgctctttgtgttcattgccctgggccggtggctggaacacttggcaaaggtaacagca

SEQ ID NO: 12529 - RNA, 81 nt, synthetic construct
  source 1..81: mol_type = other RNA
acattcttcgacacgccccccatgctctttgtgttcattgccctgggccggtggctggaacacttggcaaaggtaacagca

SEQ ID NO: 12530 - RNA, 82 nt, synthetic construct
  source 1..82: mol_type = other RNA
gacattcttcgacacgccccccatgctctttgtgttcattgccctgggccggtggctggaacacttggcaaaggtaacagca

SEQ ID NO: 12531 - RNA, 83 nt, synthetic construct
  source 1..83: mol_type = other RNA
tgacattcttcgacacgccccccatgctctttgtgttcattgccctgggccggtggctggaacacttggcaaaggtaacagca

SEQ ID NO: 12532 - RNA, 84 nt, synthetic construct
  source 1..84: mol_type = other RNA
gtgacattcttcgacacgccccccatgctctttgtgttcattgccctgggccggtggctggaacacttggcaaaggtaacagca

SEQ ID NO: 12533 - RNA, 85 nt, synthetic construct
  source 1..85: mol_type = other RNA
tgtgacattcttcgacacgccccccatgctctttgtgttcattgccctgggccggtggctggaacacttggcaaaggtaacagca

SEQ ID NO: 12534 - RNA, 86 nt, synthetic construct
  source 1..86: mol_type = other RNA
ctgtgacattcttcgacacgccccccatgctctttgtgttcattgccctgggccggtggctggaacacttggcaaaggtaacagca

SEQ ID NO: 12535 - RNA, 87 nt, synthetic construct
  source 1..87: mol_type = other RNA
cctgtgacattcttcgacacgccccccatgctctttgtgttcattgccctgggccggtggctggaacacttggcaaaggtaacagca

SEQ ID NO: 12536 - RNA, 88 nt, synthetic construct
  source 1..88: mol_type = other RNA
ccctgtgacattcttcgacacgccccccatgctctttgtgttcattgccctgggccggtggctggaacacttggcaaaggtaacagca

SEQ ID NO: 12537 - RNA, 89 nt, synthetic construct
  source 1..89: mol_type = other RNA
gccctgtgacattcttcgacacgccccccatgctctttgtgttcattgccctgggccggtggctggaacacttggcaaaggtaacagca

SEQ ID NO: 12538 - RNA, 90 nt, synthetic construct
  source 1..90: mol_type = other RNA
agccctgtgacattcttcgacacgccccccatgctctttgtgttcattgccctgggccggtggctggaacacttggcaaaggtaacagca

SEQ ID NO: 12539 - RNA, 91 nt, synthetic construct
  source 1..91: mol_type = other RNA
gagccctgtgacattcttcgacacgccccccatgctctttgtgttcattgccctgggccggtggctggaacacttggcaaaggtaacagca

SEQ ID NO: 12540 - RNA, 92 nt, synthetic construct
  source 1..92: mol_type = other RNA
ggagccctgtgacattcttcgacacgccccccatgctctttgtgttcattgccctgggccggtggctggaacacttggcaaaggtaacagca

SEQ ID NO: 12541 - RNA, 93 nt, synthetic construct
  source 1..93: mol_type = other RNA
aggagccctgtgacattcttcgacacgccccccatgctctttgtgttcattgccctgggccggtggctggaacacttggcaaaggtaacagca

SEQ ID NO: 12542 - RNA, 94 nt, synthetic construct
  source 1..94: mol_type = other RNA
gaggagccctgtgacattcttcgacacgccccccatgctctttgtgttcattgccctgggccggtggctggaacacttggcaaaggtaacagca

SEQ ID NO: 12543 - RNA, 95 nt, synthetic construct
  source 1..95: mol_type = other RNA
agaggagccctgtgacattcttcgacacgccccccatgctctttgtgttcattgccctgggccggtggctggaacacttggcaaaggtaacagca

SEQ ID NO: 12544 - RNA, 96 nt, synthetic construct
  source 1..96: mol_type = other RNA
gagaggagccctgtgacattcttcgacacgccccccatgctctttgtgttcattgccctgggccggtggctggaacacttggcaaaggtaacagca

SEQ ID NO: 12545 - RNA, 97 nt, synthetic construct
  source 1..97: mol_type = other RNA
ggagaggagccctgtgacattcttcgacacgccccccatgctctttgtgttcattgccctgggccggtggctggaacacttggcaaaggtaacagca

SEQ ID NO: 12546 - RNA, 98 nt, synthetic construct
  source 1..98: mol_type = other RNA
cggagaggagccctgtgacattcttcgacacgccccccatgctctttgtgttcattgccctgggccggtggctggaacacttggcaaaggtaacagca

SEQ ID NO: 12547 - RNA, 99 nt, synthetic construct
  source 1..99: mol_type = other RNA
gcggagaggagccctgtgacattcttcgacacgccccccatgctctttgtgttcattgccctgggccggtggctggaacacttggcaaaggtaacagca

SEQ ID NO: 12548 - RNA, 100 nt, synthetic construct
  source 1..100: mol_type = other RNA
ggcggagaggagccctgtgacattcttcgacacgccccccatgctctttgtgttcattgccctgggccggtggctggaacacttggcaaaggtaacagca

SEQ ID NO: 12549 - RNA, 16 nt, synthetic construct
  source 1..16: mol_type = other RNA
aagctgctgttacctt

SEQ ID NO: 12550 - RNA, 17 nt, synthetic construct
  source 1..17: mol_type = other RNA
gaagctgctgttacctt

SEQ ID NO: 12551 - RNA, 18 nt, synthetic construct
  source 1..18: mol_type = other RNA
tgaagctgctgttacctt

SEQ ID NO: 12552 - RNA, 19 nt, synthetic construct
  source 1..19: mol_type = other RNA
ctgaagctgctgttacctt

SEQ ID NO: 12553 - RNA, 20 nt, synthetic construct
  source 1..20: mol_type = other RNA
cctgaagctgctgttacctt

SEQ ID NO: 12554 - RNA, 21 nt, synthetic construct
  source 1..21: mol_type = other RNA
acctgaagctgctgttacctt

SEQ ID NO: 12555 - RNA, 22 nt, synthetic construct
  source 1..22: mol_type = other RNA
aacctgaagctgctgttacctt

SEQ ID NO: 12556-12560 - skipped (5 entries)

SEQ ID NO: 12561 - RNA, 10 nt, synthetic construct
  source 1..10: mol_type = other RNA
gtaacagcag

SEQ ID NO: 12562 - RNA, 11 nt, synthetic construct
  source 1..11: mol_type = other RNA
gtaacagcagc

SEQ ID NO: 12563 - RNA, 12 nt, synthetic construct
  source 1..12: mol_type = other RNA
gtaacagcagct

SEQ ID NO: 12564 - RNA, 13 nt, synthetic construct
  source 1..13: mol_type = other RNA
gtaacagcagctt

SEQ ID NO: 12565 - RNA, 14 nt, synthetic construct
  source 1..14: mol_type = other RNA
gtaacagcagcttc

SEQ ID NO: 12566 - RNA, 15 nt, synthetic construct
  source 1..15: mol_type = other RNA
gtaacagcagcttca

SEQ ID NO: 12567 - RNA, 16 nt, synthetic construct
  source 1..16: mol_type = other RNA
gtaacagcagcttcag

SEQ ID NO: 12568 - RNA, 17 nt, synthetic construct
  source 1..17: mol_type = other RNA
gtaacagcagcttcagg

SEQ ID NO: 12569 - RNA, 18 nt, synthetic construct
  source 1..18: mol_type = other RNA
gtaacagcagcttcaggt

SEQ ID NO: 12570 - RNA, 19 nt, synthetic construct
  source 1..19: mol_type = other RNA
gtaacagcagcttcaggtt

SEQ ID NO: 12571 - RNA, 23 nt, synthetic construct
  source 1..23: mol_type = other RNA
ggtggctggaacacttggcaaag

SEQ ID NO: 12572 - RNA, 24 nt, synthetic construct
  source 1..24: mol_type = other RNA
cggtggctggaacacttggcaaag

SEQ ID NO: 12573 - RNA, 25 nt, synthetic construct
  source 1..25: mol_type = other RNA
ccggtggctggaacacttggcaaag

SEQ ID NO: 12574 - RNA, 26 nt, synthetic construct
  source 1..26: mol_type = other RNA
gccggtggctggaacacttggcaaag

SEQ ID NO: 12575 - RNA, 27 nt, synthetic construct
  source 1..27: mol_type = other RNA
ggccggtggctggaacacttggcaaag

SEQ ID NO: 12576 - RNA, 28 nt, synthetic construct
  source 1..28: mol_type = other RNA
gggccggtggctggaacacttggcaaag

SEQ ID NO: 12577 - RNA, 29 nt, synthetic construct
  source 1..29: mol_type = other RNA
tgggccggtggctggaacacttggcaaag

SEQ ID NO: 12578 - RNA, 30 nt, synthetic construct
  source 1..30: mol_type = other RNA
ctgggccggtggctggaacacttggcaaag

SEQ ID NO: 12579 - RNA, 31 nt, synthetic construct
  source 1..31: mol_type = other RNA
cctgggccggtggctggaacacttggcaaag

SEQ ID NO: 12580 - RNA, 32 nt, synthetic construct
  source 1..32: mol_type = other RNA
ccctgggccggtggctggaacacttggcaaag

SEQ ID NO: 12581 - RNA, 33 nt, synthetic construct
  source 1..33: mol_type = other RNA
gccctgggccggtggctggaacacttggcaaag

SEQ ID NO: 12582 - RNA, 34 nt, synthetic construct
  source 1..34: mol_type = other RNA
tgccctgggccggtggctggaacacttggcaaag

SEQ ID NO: 12583 - RNA, 35 nt, synthetic construct
  source 1..35: mol_type = other RNA
ttgccctgggccggtggctggaacacttggcaaag

SEQ ID NO: 12584 - RNA, 36 nt, synthetic construct
  source 1..36: mol_type = other RNA
attgccctgggccggtggctggaacacttggcaaag

SEQ ID NO: 12585 - RNA, 37 nt, synthetic construct
  source 1..37: mol_type = other RNA
cattgccctgggccggtggctggaacacttggcaaag

SEQ ID NO: 12586 - RNA, 38 nt, synthetic construct
  source 1..38: mol_type = other RNA
tcattgccctgggccggtggctggaacacttggcaaag

SEQ ID NO: 12587 - RNA, 39 nt, synthetic construct
  source 1..39: mol_type = other RNA
ttcattgccctgggccggtggctggaacacttggcaaag

SEQ ID NO: 12588 - RNA, 40 nt, synthetic construct
  source 1..40: mol_type = other RNA
gttcattgccctgggccggtggctggaacacttggcaaag

SEQ ID NO: 12589 - RNA, 41 nt, synthetic construct
  source 1..41: mol_type = other RNA
tgttcattgccctgggccggtggctggaacacttggcaaag

SEQ ID NO: 12590 - RNA, 42 nt, synthetic construct
  source 1..42: mol_type = other RNA
gtgttcattgccctgggccggtggctggaacacttggcaaag

SEQ ID NO: 12591 - RNA, 43 nt, synthetic construct
  source 1..43: mol_type = other RNA
tgtgttcattgccctgggccggtggctggaacacttggcaaag

SEQ ID NO: 12592 - RNA, 44 nt, synthetic construct
  source 1..44: mol_type = other RNA
ttgtgttcattgccctgggccggtggctggaacacttggcaaag

SEQ ID NO: 12593 - RNA, 45 nt, synthetic construct
  source 1..45: mol_type = other RNA
tttgtgttcattgccctgggccggtggctggaacacttggcaaag

SEQ ID NO: 12594 - RNA, 46 nt, synthetic construct
  source 1..46: mol_type = other RNA
ctttgtgttcattgccctgggccggtggctggaacacttggcaaag

SEQ ID NO: 12595 - RNA, 47 nt, synthetic construct
  source 1..47: mol_type = other RNA
tctttgtgttcattgccctgggccggtggctggaacacttggcaaag

SEQ ID NO: 12596 - RNA, 48 nt, synthetic construct
  source 1..48: mol_type = other RNA
ctctttgtgttcattgccctgggccggtggctggaacacttggcaaag

SEQ ID NO: 12597 - RNA, 49 nt, synthetic construct
  source 1..49: mol_type = other RNA
gctctttgtgttcattgccctgggccggtggctggaacacttggcaaag

SEQ ID NO: 12598 - RNA, 50 nt, synthetic construct
  source 1..50: mol_type = other RNA
tgctctttgtgttcattgccctgggccggtggctggaacacttggcaaag

SEQ ID NO: 12599 - RNA, 51 nt, synthetic construct
  source 1..51: mol_type = other RNA
atgctctttgtgttcattgccctgggccggtggctggaacacttggcaaag

SEQ ID NO: 12600 - RNA, 52 nt, synthetic construct
  source 1..52: mol_type = other RNA
catgctctttgtgttcattgccctgggccggtggctggaacacttggcaaag

SEQ ID NO: 12601 - RNA, 53 nt, synthetic construct
  source 1..53: mol_type = other RNA
ccatgctctttgtgttcattgccctgggccggtggctggaacacttggcaaag

SEQ ID NO: 12602 - RNA, 54 nt, synthetic construct
  source 1..54: mol_type = other RNA
cccatgctctttgtgttcattgccctgggccggtggctggaacacttggcaaag

SEQ ID NO: 12603 - RNA, 55 nt, synthetic construct
  source 1..55: mol_type = other RNA
ccccatgctctttgtgttcattgccctgggccggtggctggaacacttggcaaag

SEQ ID NO: 12604 - RNA, 56 nt, synthetic construct
  source 1..56: mol_type = other RNA
cccccatgctctttgtgttcattgccctgggccggtggctggaacacttggcaaag

SEQ ID NO: 12605 - RNA, 57 nt, synthetic construct
  source 1..57: mol_type = other RNA
ccccccatgctctttgtgttcattgccctgggccggtggctggaacacttggcaaag

SEQ ID NO: 12606 - RNA, 58 nt, synthetic construct
  source 1..58: mol_type = other RNA
gccccccatgctctttgtgttcattgccctgggccggtggctggaacacttggcaaag

SEQ ID NO: 12607 - RNA, 59 nt, synthetic construct
  source 1..59: mol_type = other RNA
cgccccccatgctctttgtgttcattgccctgggccggtggctggaacacttggcaaag

SEQ ID NO: 12608 - RNA, 60 nt, synthetic construct
  source 1..60: mol_type = other RNA
acgccccccatgctctttgtgttcattgccctgggccggtggctggaacacttggcaaag

SEQ ID NO: 12609 - RNA, 61 nt, synthetic construct
  source 1..61: mol_type = other RNA
cacgccccccatgctctttgtgttcattgccctgggccggtggctggaacacttggcaaag

SEQ ID NO: 12610 - RNA, 62 nt, synthetic construct
  source 1..62: mol_type = other RNA
acacgccccccatgctctttgtgttcattgccctgggccggtggctggaacacttggcaaag

SEQ ID NO: 12611 - RNA, 63 nt, synthetic construct
  source 1..63: mol_type = other RNA
gacacgccccccatgctctttgtgttcattgccctgggccggtggctggaacacttggcaaag

SEQ ID NO: 12612 - RNA, 64 nt, synthetic construct
  source 1..64: mol_type = other RNA
cgacacgccccccatgctctttgtgttcattgccctgggccggtggctggaacacttggcaaag

SEQ ID NO: 12613 - RNA, 65 nt, synthetic construct
  source 1..65: mol_type = other RNA
tcgacacgccccccatgctctttgtgttcattgccctgggccggtggctggaacacttggcaaag

SEQ ID NO: 12614 - RNA, 66 nt, synthetic construct
  source 1..66: mol_type = other RNA
ttcgacacgccccccatgctctttgtgttcattgccctgggccggtggctggaacacttggcaaag

SEQ ID NO: 12615 - RNA, 67 nt, synthetic construct
  source 1..67: mol_type = other RNA
cttcgacacgccccccatgctctttgtgttcattgccctgggccggtggctggaacacttggcaaag

SEQ ID NO: 12616 - RNA, 68 nt, synthetic construct
  source 1..68: mol_type = other RNA
tcttcgacacgccccccatgctctttgtgttcattgccctgggccggtggctggaacacttggcaaag

SEQ ID NO: 12617 - RNA, 69 nt, synthetic construct
  source 1..69: mol_type = other RNA
ttcttcgacacgccccccatgctctttgtgttcattgccctgggccggtggctggaacacttggcaaag

SEQ ID NO: 12618 - RNA, 70 nt, synthetic construct
  source 1..70: mol_type = other RNA
attcttcgacacgccccccatgctctttgtgttcattgccctgggccggtggctggaacacttggcaaag

SEQ ID NO: 12619 - RNA, 71 nt, synthetic construct
  source 1..71: mol_type = other RNA
cattcttcgacacgccccccatgctctttgtgttcattgccctgggccggtggctggaacacttggcaaag

SEQ ID NO: 12620 - RNA, 72 nt, synthetic construct
  source 1..72: mol_type = other RNA
acattcttcgacacgccccccatgctctttgtgttcattgccctgggccggtggctggaacacttggcaaag

SEQ ID NO: 12621 - RNA, 73 nt, synthetic construct
  source 1..73: mol_type = other RNA
gacattcttcgacacgccccccatgctctttgtgttcattgccctgggccggtggctggaacacttggcaaag

SEQ ID NO: 12622 - RNA, 74 nt, synthetic construct
  source 1..74: mol_type = other RNA
tgacattcttcgacacgccccccatgctctttgtgttcattgccctgggccggtggctggaacacttggcaaag

SEQ ID NO: 12623 - RNA, 75 nt, synthetic construct
  source 1..75: mol_type = other RNA
gtgacattcttcgacacgccccccatgctctttgtgttcattgccctgggccggtggctggaacacttggcaaag

SEQ ID NO: 12624 - RNA, 76 nt, synthetic construct
  source 1..76: mol_type = other RNA
tgtgacattcttcgacacgccccccatgctctttgtgttcattgccctgggccggtggctggaacacttggcaaag

SEQ ID NO: 12625 - RNA, 77 nt, synthetic construct
  source 1..77: mol_type = other RNA
ctgtgacattcttcgacacgccccccatgctctttgtgttcattgccctgggccggtggctggaacacttggcaaag

SEQ ID NO: 12626 - RNA, 78 nt, synthetic construct
  source 1..78: mol_type = other RNA
cctgtgacattcttcgacacgccccccatgctctttgtgttcattgccctgggccggtggctggaacacttggcaaag

SEQ ID NO: 12627 - RNA, 79 nt, synthetic construct
  source 1..79: mol_type = other RNA
ccctgtgacattcttcgacacgccccccatgctctttgtgttcattgccctgggccggtggctggaacacttggcaaag

SEQ ID NO: 12628 - RNA, 80 nt, synthetic construct
  source 1..80: mol_type = other RNA
gccctgtgacattcttcgacacgccccccatgctctttgtgttcattgccctgggccggtggctggaacacttggcaaag

SEQ ID NO: 12629 - RNA, 81 nt, synthetic construct
  source 1..81: mol_type = other RNA
agccctgtgacattcttcgacacgccccccatgctctttgtgttcattgccctgggccggtggctggaacacttggcaaag

SEQ ID NO: 12630 - RNA, 82 nt, synthetic construct
  source 1..82: mol_type = other RNA
gagccctgtgacattcttcgacacgccccccatgctctttgtgttcattgccctgggccggtggctggaacacttggcaaag

SEQ ID NO: 12631 - RNA, 83 nt, synthetic construct
  source 1..83: mol_type = other RNA
ggagccctgtgacattcttcgacacgccccccatgctctttgtgttcattgccctgggccggtggctggaacacttggcaaag

SEQ ID NO: 12632 - RNA, 84 nt, synthetic construct
  source 1..84: mol_type = other RNA
aggagccctgtgacattcttcgacacgccccccatgctctttgtgttcattgccctgggccggtggctggaacacttggcaaag

SEQ ID NO: 12633 - RNA, 85 nt, synthetic construct
  source 1..85: mol_type = other RNA
gaggagccctgtgacattcttcgacacgccccccatgctctttgtgttcattgccctgggccggtggctggaacacttggcaaag

SEQ ID NO: 12634 - RNA, 86 nt, synthetic construct
  source 1..86: mol_type = other RNA
agaggagccctgtgacattcttcgacacgccccccatgctctttgtgttcattgccctgggccggtggctggaacacttggcaaag

SEQ ID NO: 12635 - RNA, 87 nt, synthetic construct
  source 1..87: mol_type = other RNA
gagaggagccctgtgacattcttcgacacgccccccatgctctttgtgttcattgccctgggccggtggctggaacacttggcaaag

SEQ ID NO: 12636 - RNA, 88 nt, synthetic construct
  source 1..88: mol_type = other RNA
ggagaggagccctgtgacattcttcgacacgccccccatgctctttgtgttcattgccctgggccggtggctggaacacttggcaaag

SEQ ID NO: 12637 - RNA, 89 nt, synthetic construct
  source 1..89: mol_type = other RNA
cggagaggagccctgtgacattcttcgacacgccccccatgctctttgtgttcattgccctgggccggtggctggaacacttggcaaag

SEQ ID NO: 12638 - RNA, 90 nt, synthetic construct
  source 1..90: mol_type = other RNA
gcggagaggagccctgtgacattcttcgacacgccccccatgctctttgtgttcattgccctgggccggtggctggaacacttggcaaag

SEQ ID NO: 12639 - RNA, 91 nt, synthetic construct
  source 1..91: mol_type = other RNA
ggcggagaggagccctgtgacattcttcgacacgccccccatgctctttgtgttcattgccctgggccggtggctggaacacttggcaaag

SEQ ID NO: 12640 - RNA, 92 nt, synthetic construct
  source 1..92: mol_type = other RNA
aggcggagaggagccctgtgacattcttcgacacgccccccatgctctttgtgttcattgccctgggccggtggctggaacacttggcaaag

SEQ ID NO: 12641 - RNA, 93 nt, synthetic construct
  source 1..93: mol_type = other RNA
aaggcggagaggagccctgtgacattcttcgacacgccccccatgctctttgtgttcattgccctgggccggtggctggaacacttggcaaag

SEQ ID NO: 12642 - RNA, 94 nt, synthetic construct
  source 1..94: mol_type = other RNA
gaaggcggagaggagccctgtgacattcttcgacacgccccccatgctctttgtgttcattgccctgggccggtggctggaacacttggcaaag

SEQ ID NO: 12643 - RNA, 95 nt, synthetic construct
  source 1..95: mol_type = other RNA
agaaggcggagaggagccctgtgacattcttcgacacgccccccatgctctttgtgttcattgccctgggccggtggctggaacacttggcaaag

SEQ ID NO: 12644 - RNA, 96 nt, synthetic construct
  source 1..96: mol_type = other RNA
gagaaggcggagaggagccctgtgacattcttcgacacgccccccatgctctttgtgttcattgccctgggccggtggctggaacacttggcaaag

SEQ ID NO: 12645 - RNA, 97 nt, synthetic construct
  source 1..97: mol_type = other RNA
tgagaaggcggagaggagccctgtgacattcttcgacacgccccccatgctctttgtgttcattgccctgggccggtggctggaacacttggcaaag

SEQ ID NO: 12646 - RNA, 98 nt, synthetic construct
  source 1..98: mol_type = other RNA
ctgagaaggcggagaggagccctgtgacattcttcgacacgccccccatgctctttgtgttcattgccctgggccggtggctggaacacttggcaaag

SEQ ID NO: 12647 - RNA, 99 nt, synthetic construct
  source 1..99: mol_type = other RNA
gctgagaaggcggagaggagccctgtgacattcttcgacacgccccccatgctctttgtgttcattgccctgggccggtggctggaacacttggcaaag

SEQ ID NO: 12648 - RNA, 100 nt, synthetic construct
  source 1..100: mol_type = other RNA
ggctgagaaggcggagaggagccctgtgacattcttcgacacgccccccatgctctttgtgttcattgccctgggccggtggctggaacacttggcaaag

SEQ ID NO: 12649 - RNA, 16 nt, synthetic construct
  source 1..16: mol_type = other RNA
gctgttacctttgcca

SEQ ID NO: 12650 - RNA, 17 nt, synthetic construct
  source 1..17: mol_type = other RNA
tgctgttacctttgcca

SEQ ID NO: 12651 - RNA, 18 nt, synthetic construct
  source 1..18: mol_type = other RNA
ctgctgttacctttgcca

SEQ ID NO: 12652 - RNA, 19 nt, synthetic construct
  source 1..19: mol_type = other RNA
gctgctgttacctttgcca

SEQ ID NO: 12653 - RNA, 20 nt, synthetic construct
  source 1..20: mol_type = other RNA
agctgctgttacctttgcca

SEQ ID NO: 12654 - RNA, 21 nt, synthetic construct
  source 1..21: mol_type = other RNA
aagctgctgttacctttgcca

SEQ ID NO: 12655 - RNA, 22 nt, synthetic construct
  source 1..22: mol_type = other RNA
gaagctgctgttacctttgcca

SEQ ID NO: 12656-12661 - skipped (6 entries)

SEQ ID NO: 12662 - RNA, 10 nt, synthetic construct
  source 1..10: mol_type = other RNA
caaaggtaac

SEQ ID NO: 12663 - RNA, 11 nt, synthetic construct
  source 1..11: mol_type = other RNA
caaaggtaaca

SEQ ID NO: 12664 - RNA, 12 nt, synthetic construct
  source 1..12: mol_type = other RNA
caaaggtaacag

SEQ ID NO: 12665 - RNA, 13 nt, synthetic construct
  source 1..13: mol_type = other RNA
caaaggtaacagc

SEQ ID NO: 12666 - RNA, 14 nt, synthetic construct
  source 1..14: mol_type = other RNA
caaaggtaacagca

SEQ ID NO: 12667 - RNA, 15 nt, synthetic construct
  source 1..15: mol_type = other RNA
caaaggtaacagcag

SEQ ID NO: 12668 - RNA, 16 nt, synthetic construct
  source 1..16: mol_type = other RNA
caaaggtaacagcagc

SEQ ID NO: 12669 - RNA, 17 nt, synthetic construct
  source 1..17: mol_type = other RNA
caaaggtaacagcagct

SEQ ID NO: 12670 - RNA, 18 nt, synthetic construct
  source 1..18: mol_type = other RNA
caaaggtaacagcagctt

SEQ ID NO: 12671 - RNA, 19 nt, synthetic construct
  source 1..19: mol_type = other RNA
caaaggtaacagcagcttc

SEQ ID NO: 12672 - RNA, 18 nt, synthetic construct
  source 1..18: mol_type = other RNA
ggtggctggaacacttgg

SEQ ID NO: 12673 - RNA, 18 nt, synthetic construct
  source 1..18: mol_type = other RNA
ggtggctggaacatttgg

SEQ ID NO: 12674 - RNA, 19 nt, synthetic construct
  source 1..19: mol_type = other RNA
cggtggctggaacatttgg

SEQ ID NO: 12675 - RNA, 19 nt, synthetic construct
  source 1..19: mol_type = other RNA
cggtggctggaacacttgg

SEQ ID NO: 12676 - RNA, 20 nt, synthetic construct
  source 1..20: mol_type = other RNA
ccggtggctggaacatttgg

SEQ ID NO: 12677 - RNA, 20 nt, synthetic construct
  source 1..20: mol_type = other RNA
ccggtggctggaacacttgg

SEQ ID NO: 12678 - RNA, 21 nt, synthetic construct
  source 1..21: mol_type = other RNA
gccggtggctggaacatttgg

SEQ ID NO: 12679 - RNA, 21 nt, synthetic construct
  source 1..21: mol_type = other RNA
gccggtggctggaacacttgg

SEQ ID NO: 12680 - RNA, 22 nt, synthetic construct
  source 1..22: mol_type = other RNA
ggccggtggctggaacatttgg

SEQ ID NO: 12681 - RNA, 22 nt, synthetic construct
  source 1..22: mol_type = other RNA
ggccggtggctggaacacttgg

SEQ ID NO: 12682 - RNA, 23 nt, synthetic construct
  source 1..23: mol_type = other RNA
gggccggtggctggaacacttgg

SEQ ID NO: 12683 - RNA, 23 nt, synthetic construct
  source 1..23: mol_type = other RNA
gggccggtggctggaacatttgg

SEQ ID NO: 12684 - RNA, 24 nt, synthetic construct
  source 1..24: mol_type = other RNA
tgggccggtggctggaacatttgg

SEQ ID NO: 12685 - RNA, 24 nt, synthetic construct
  source 1..24: mol_type = other RNA
tgggccggtggctggaacacttgg

SEQ ID NO: 12686 - RNA, 25 nt, synthetic construct
  source 1..25: mol_type = other RNA
ctgggccggtggctggaacatttgg

SEQ ID NO: 12687 - RNA, 25 nt, synthetic construct
  source 1..25: mol_type = other RNA
ctgggccggtggctggaacacttgg

SEQ ID NO: 12688 - RNA, 26 nt, synthetic construct
  source 1..26: mol_type = other RNA
cctgggccggtggctggaacacttgg

SEQ ID NO: 12689 - RNA, 26 nt, synthetic construct
  source 1..26: mol_type = other RNA
cctgggccggtggctggaacatttgg

SEQ ID NO: 12690 - RNA, 27 nt, synthetic construct
  source 1..27: mol_type = other RNA
ccctgggccggtggctggaacatttgg

SEQ ID NO: 12691 - RNA, 27 nt, synthetic construct
  source 1..27: mol_type = other RNA
ccctgggccggtggctggaacacttgg

SEQ ID NO: 12692 - RNA, 28 nt, synthetic construct
  source 1..28: mol_type = other RNA
gccctgggccggtggctggaacatttgg

SEQ ID NO: 12693 - RNA, 28 nt, synthetic construct
  source 1..28: mol_type = other RNA
gccctgggccggtggctggaacacttgg

SEQ ID NO: 12694 - RNA, 29 nt, synthetic construct
  source 1..29: mol_type = other RNA
tgccctgggccggtggctggaacacttgg

SEQ ID NO: 12695 - RNA, 29 nt, synthetic construct
  source 1..29: mol_type = other RNA
tgccctgggccggtggctggaacatttgg

SEQ ID NO: 12696 - RNA, 30 nt, synthetic construct
  source 1..30: mol_type = other RNA
ttgccctgggccggtggctggaacacttgg

SEQ ID NO: 12697 - RNA, 30 nt, synthetic construct
  source 1..30: mol_type = other RNA
ttgccctgggccggtggctggaacatttgg

SEQ ID NO: 12698 - RNA, 31 nt, synthetic construct
  source 1..31: mol_type = other RNA
attgccctgggccggtggctggaacatttgg

SEQ ID NO: 12699 - RNA, 31 nt, synthetic construct
  source 1..31: mol_type = other RNA
attgccctgggccggtggctggaacacttgg

SEQ ID NO: 12700 - RNA, 32 nt, synthetic construct
  source 1..32: mol_type = other RNA
cattgccctgggccggtggctggaacacttgg

SEQ ID NO: 12701 - RNA, 32 nt, synthetic construct
  source 1..32: mol_type = other RNA
cattgccctgggccggtggctggaacatttgg

SEQ ID NO: 12702 - RNA, 33 nt, synthetic construct
  source 1..33: mol_type = other RNA
tcattgccctgggccggtggctggaacacttgg

SEQ ID NO: 12703 - RNA, 33 nt, synthetic construct
  source 1..33: mol_type = other RNA
tcattgccctgggccggtggctggaacatttgg

SEQ ID NO: 12704 - RNA, 34 nt, synthetic construct
  source 1..34: mol_type = other RNA
ttcattgccctgggccggtggctggaacacttgg

SEQ ID NO: 12705 - RNA, 34 nt, synthetic construct
  source 1..34: mol_type = other RNA
ttcattgccctgggccggtggctggaacatttgg

SEQ ID NO: 12706 - RNA, 35 nt, synthetic construct
  source 1..35: mol_type = other RNA
gttcattgccctgggccggtggctggaacatttgg

SEQ ID NO: 12707 - RNA, 35 nt, synthetic construct
  source 1..35: mol_type = other RNA
gttcattgccctgggccggtggctggaacacttgg

SEQ ID NO: 12708 - RNA, 36 nt, synthetic construct
  source 1..36: mol_type = other RNA
tgttcattgccctgggccggtggctggaacacttgg

SEQ ID NO: 12709 - RNA, 36 nt, synthetic construct
  source 1..36: mol_type = other RNA
tgttcattgccctgggccggtggctggaacatttgg

SEQ ID NO: 12710 - RNA, 37 nt, synthetic construct
  source 1..37: mol_type = other RNA
gtgttcattgccctgggccggtggctggaacatttgg

SEQ ID NO: 12711 - RNA, 37 nt, synthetic construct
  source 1..37: mol_type = other RNA
gtgttcattgccctgggccggtggctggaacacttgg

SEQ ID NO: 12712 - RNA, 38 nt, synthetic construct
  source 1..38: mol_type = other RNA
tgtgttcattgccctgggccggtggctggaacatttgg

SEQ ID NO: 12713 - RNA, 38 nt, synthetic construct
  source 1..38: mol_type = other RNA
tgtgttcattgccctgggccggtggctggaacacttgg

SEQ ID NO: 12714 - RNA, 39 nt, synthetic construct
  source 1..39: mol_type = other RNA
ttgtgttcattgccctgggccggtggctggaacacttgg

SEQ ID NO: 12715 - RNA, 39 nt, synthetic construct
  source 1..39: mol_type = other RNA
ttgtgttcattgccctgggccggtggctggaacatttgg

SEQ ID NO: 12716 - RNA, 40 nt, synthetic construct
  source 1..40: mol_type = other RNA
tttgtgttcattgccctgggccggtggctggaacatttgg

SEQ ID NO: 12717 - RNA, 40 nt, synthetic construct
  source 1..40: mol_type = other RNA
tttgtgttcattgccctgggccggtggctggaacacttgg

SEQ ID NO: 12718 - RNA, 41 nt, synthetic construct
  source 1..41: mol_type = other RNA
ctttgtgttcattgccctgggccggtggctggaacacttgg

SEQ ID NO: 12719 - RNA, 41 nt, synthetic construct
  source 1..41: mol_type = other RNA
ctttgtgttcattgccctgggccggtggctggaacatttgg

SEQ ID NO: 12720 - RNA, 42 nt, synthetic construct
  source 1..42: mol_type = other RNA
tctttgtgttcattgccctgggccggtggctggaacatttgg

SEQ ID NO: 12721 - RNA, 42 nt, synthetic construct
  source 1..42: mol_type = other RNA
tctttgtgttcattgccctgggccggtggctggaacacttgg

SEQ ID NO: 12722 - RNA, 43 nt, synthetic construct
  source 1..43: mol_type = other RNA
ctctttgtgttcattgccctgggccggtggctggaacatttgg

SEQ ID NO: 12723 - RNA, 43 nt, synthetic construct
  source 1..43: mol_type = other RNA
ctctttgtgttcattgccctgggccggtggctggaacacttgg

SEQ ID NO: 12724 - RNA, 44 nt, synthetic construct
  source 1..44: mol_type = other RNA
gctctttgtgttcattgccctgggccggtggctggaacatttgg

SEQ ID NO: 12725 - RNA, 44 nt, synthetic construct
  source 1..44: mol_type = other RNA
gctctttgtgttcattgccctgggccggtggctggaacacttgg

SEQ ID NO: 12726 - RNA, 45 nt, synthetic construct
  source 1..45: mol_type = other RNA
tgctctttgtgttcattgccctgggccggtggctggaacatttgg

SEQ ID NO: 12727 - RNA, 45 nt, synthetic construct
  source 1..45: mol_type = other RNA
tgctctttgtgttcattgccctgggccggtggctggaacacttgg

SEQ ID NO: 12728 - RNA, 46 nt, synthetic construct
  source 1..46: mol_type = other RNA
atgctctttgtgttcattgccctgggccggtggctggaacatttgg

SEQ ID NO: 12729 - RNA, 46 nt, synthetic construct
  source 1..46: mol_type = other RNA
atgctctttgtgttcattgccctgggccggtggctggaacacttgg

SEQ ID NO: 12730 - RNA, 47 nt, synthetic construct
  source 1..47: mol_type = other RNA
catgctctttgtgttcattgccctgggccggtggctggaacacttgg

SEQ ID NO: 12731 - RNA, 47 nt, synthetic construct
  source 1..47: mol_type = other RNA
catgctctttgtgttcattgccctgggccggtggctggaacatttgg

SEQ ID NO: 12732 - RNA, 48 nt, synthetic construct
  source 1..48: mol_type = other RNA
ccatgctctttgtgttcattgccctgggccggtggctggaacacttgg

SEQ ID NO: 12733 - RNA, 48 nt, synthetic construct
  source 1..48: mol_type = other RNA
ccatgctctttgtgttcattgccctgggccggtggctggaacatttgg

SEQ ID NO: 12734 - RNA, 49 nt, synthetic construct
  source 1..49: mol_type = other RNA
cccatgctctttgtgttcattgccctgggccggtggctggaacatttgg

SEQ ID NO: 12735 - RNA, 49 nt, synthetic construct
  source 1..49: mol_type = other RNA
cccatgctctttgtgttcattgccctgggccggtggctggaacacttgg

SEQ ID NO: 12736 - RNA, 50 nt, synthetic construct
  source 1..50: mol_type = other RNA
ccccatgctctttgtgttcattgccctgggccggtggctggaacatttgg

SEQ ID NO: 12737 - RNA, 50 nt, synthetic construct
  source 1..50: mol_type = other RNA
ccccatgctctttgtgttcattgccctgggccggtggctggaacacttgg

SEQ ID NO: 12738 - RNA, 51 nt, synthetic construct
  source 1..51: mol_type = other RNA
cccccatgctctttgtgttcattgccctgggccggtggctggaacacttgg

SEQ ID NO: 12739 - RNA, 51 nt, synthetic construct
  source 1..51: mol_type = other RNA
cccccatgctctttgtgttcattgccctgggccggtggctggaacatttgg

SEQ ID NO: 12740 - RNA, 52 nt, synthetic construct
  source 1..52: mol_type = other RNA
ccccccatgctctttgtgttcattgccctgggccggtggctggaacatttgg

SEQ ID NO: 12741 - RNA, 52 nt, synthetic construct
  source 1..52: mol_type = other RNA
ccccccatgctctttgtgttcattgccctgggccggtggctggaacacttgg

SEQ ID NO: 12742 - RNA, 53 nt, synthetic construct
  source 1..53: mol_type = other RNA
gccccccatgctctttgtgttcattgccctgggccggtggctggaacacttgg

SEQ ID NO: 12743 - RNA, 53 nt, synthetic construct
  source 1..53: mol_type = other RNA
gccccccatgctctttgtgttcattgccctgggccggtggctggaacatttgg

SEQ ID NO: 12744 - RNA, 54 nt, synthetic construct
  source 1..54: mol_type = other RNA
cgccccccatgctctttgtgttcattgccctgggccggtggctggaacacttgg

SEQ ID NO: 12745 - RNA, 54 nt, synthetic construct
  source 1..54: mol_type = other RNA
cgccccccatgctctttgtgttcattgccctgggccggtggctggaacatttgg

SEQ ID NO: 12746 - RNA, 55 nt, synthetic construct
  source 1..55: mol_type = other RNA
acgccccccatgctctttgtgttcattgccctgggccggtggctggaacacttgg

SEQ ID NO: 12747 - RNA, 55 nt, synthetic construct
  source 1..55: mol_type = other RNA
acgccccccatgctctttgtgttcattgccctgggccggtggctggaacatttgg

SEQ ID NO: 12748 - RNA, 56 nt, synthetic construct
  source 1..56: mol_type = other RNA
cacgccccccatgctctttgtgttcattgccctgggccggtggctggaacatttgg

SEQ ID NO: 12749 - RNA, 56 nt, synthetic construct
  source 1..56: mol_type = other RNA
cacgccccccatgctctttgtgttcattgccctgggccggtggctggaacacttgg

SEQ ID NO: 12750 - RNA, 57 nt, synthetic construct
  source 1..57: mol_type = other RNA
acacgccccccatgctctttgtgttcattgccctgggccggtggctggaacatttgg

SEQ ID NO: 12751 - RNA, 57 nt, synthetic construct
  source 1..57: mol_type = other RNA
acacgccccccatgctctttgtgttcattgccctgggccggtggctggaacacttgg

SEQ ID NO: 12752 - RNA, 58 nt, synthetic construct
  source 1..58: mol_type = other RNA
gacacgccccccatgctctttgtgttcattgccctgggccggtggctggaacatttgg

SEQ ID NO: 12753 - RNA, 58 nt, synthetic construct
  source 1..58: mol_type = other RNA
gacacgccccccatgctctttgtgttcattgccctgggccggtggctggaacacttgg

SEQ ID NO: 12754 - RNA, 59 nt, synthetic construct
  source 1..59: mol_type = other RNA
cgacacgccccccatgctctttgtgttcattgccctgggccggtggctggaacatttgg

SEQ ID NO: 12755 - RNA, 59 nt, synthetic construct
  source 1..59: mol_type = other RNA
cgacacgccccccatgctctttgtgttcattgccctgggccggtggctggaacacttgg

SEQ ID NO: 12756 - RNA, 60 nt, synthetic construct
  source 1..60: mol_type = other RNA
tcgacacgccccccatgctctttgtgttcattgccctgggccggtggctggaacatttgg

SEQ ID NO: 12757 - RNA, 60 nt, synthetic construct
  source 1..60: mol_type = other RNA
tcgacacgccccccatgctctttgtgttcattgccctgggccggtggctggaacacttgg

SEQ ID NO: 12758 - RNA, 61 nt, synthetic construct
  source 1..61: mol_type = other RNA
ttcgacacgccccccatgctctttgtgttcattgccctgggccggtggctggaacatttgg

SEQ ID NO: 12759 - RNA, 61 nt, synthetic construct
  source 1..61: mol_type = other RNA
ttcgacacgccccccatgctctttgtgttcattgccctgggccggtggctggaacacttgg

SEQ ID NO: 12760 - RNA, 62 nt, synthetic construct
  source 1..62: mol_type = other RNA
cttcgacacgccccccatgctctttgtgttcattgccctgggccggtggctggaacacttgg

SEQ ID NO: 12761 - RNA, 62 nt, synthetic construct
  source 1..62: mol_type = other RNA
cttcgacacgccccccatgctctttgtgttcattgccctgggccggtggctggaacatttgg

SEQ ID NO: 12762 - RNA, 63 nt, synthetic construct
  source 1..63: mol_type = other RNA
tcttcgacacgccccccatgctctttgtgttcattgccctgggccggtggctggaacacttgg

SEQ ID NO: 12763 - RNA, 63 nt, synthetic construct
  source 1..63: mol_type = other RNA
tcttcgacacgccccccatgctctttgtgttcattgccctgggccggtggctggaacatttgg

SEQ ID NO: 12764 - RNA, 64 nt, synthetic construct
  source 1..64: mol_type = other RNA
ttcttcgacacgccccccatgctctttgtgttcattgccctgggccggtggctggaacacttgg

SEQ ID NO: 12765 - RNA, 64 nt, synthetic construct
  source 1..64: mol_type = other RNA
ttcttcgacacgccccccatgctctttgtgttcattgccctgggccggtggctggaacatttgg

SEQ ID NO: 12766 - RNA, 65 nt, synthetic construct
  source 1..65: mol_type = other RNA
attcttcgacacgccccccatgctctttgtgttcattgccctgggccggtggctggaacacttgg

SEQ ID NO: 12767 - RNA, 65 nt, synthetic construct
  source 1..65: mol_type = other RNA
attcttcgacacgccccccatgctctttgtgttcattgccctgggccggtggctggaacatttgg

SEQ ID NO: 12768 - RNA, 66 nt, synthetic construct
  source 1..66: mol_type = other RNA
cattcttcgacacgccccccatgctctttgtgttcattgccctgggccggtggctggaacacttgg

SEQ ID NO: 12769 - RNA, 66 nt, synthetic construct
  source 1..66: mol_type = other RNA
cattcttcgacacgccccccatgctctttgtgttcattgccctgggccggtggctggaacatttgg

SEQ ID NO: 12770 - RNA, 67 nt, synthetic construct
  source 1..67: mol_type = other RNA
acattcttcgacacgccccccatgctctttgtgttcattgccctgggccggtggctggaacatttgg

SEQ ID NO: 12771 - RNA, 67 nt, synthetic construct
  source 1..67: mol_type = other RNA
acattcttcgacacgccccccatgctctttgtgttcattgccctgggccggtggctggaacacttgg

SEQ ID NO: 12772 - RNA, 68 nt, synthetic construct
  source 1..68: mol_type = other RNA
gacattcttcgacacgccccccatgctctttgtgttcattgccctgggccggtggctggaacacttgg

SEQ ID NO: 12773 - RNA, 68 nt, synthetic construct
  source 1..68: mol_type = other RNA
gacattcttcgacacgccccccatgctctttgtgttcattgccctgggccggtggctggaacatttgg

SEQ ID NO: 12774 - RNA, 69 nt, synthetic construct
  source 1..69: mol_type = other RNA
tgacattcttcgacacgccccccatgctctttgtgttcattgccctgggccggtggctggaacacttgg

SEQ ID NO: 12775 - RNA, 69 nt, synthetic construct
  source 1..69: mol_type = other RNA
tgacattcttcgacacgccccccatgctctttgtgttcattgccctgggccggtggctggaacatttgg

SEQ ID NO: 12776 - RNA, 70 nt, synthetic construct
  source 1..70: mol_type = other RNA
gtgacattcttcgacacgccccccatgctctttgtgttcattgccctgggccggtggctggaacatttgg

SEQ ID NO: 12777 - RNA, 70 nt, synthetic construct
  source 1..70: mol_type = other RNA
gtgacattcttcgacacgccccccatgctctttgtgttcattgccctgggccggtggctggaacacttgg

SEQ ID NO: 12778 - RNA, 71 nt, synthetic construct
  source 1..71: mol_type = other RNA
tgtgacattcttcgacacgccccccatgctctttgtgttcattgccctgggccggtggctggaacatttgg

SEQ ID NO: 12779 - RNA, 71 nt, synthetic construct
  source 1..71: mol_type = other RNA
tgtgacattcttcgacacgccccccatgctctttgtgttcattgccctgggccggtggctggaacacttgg

SEQ ID NO: 12780 - RNA, 72 nt, synthetic construct
  source 1..72: mol_type = other RNA
ctgtgacattcttcgacacgccccccatgctctttgtgttcattgccctgggccggtggctggaacacttgg

SEQ ID NO: 12781 - RNA, 72 nt, synthetic construct
  source 1..72: mol_type = other RNA
ctgtgacattcttcgacacgccccccatgctctttgtgttcattgccctgggccggtggctggaacatttgg

SEQ ID NO: 12782 - RNA, 73 nt, synthetic construct
  source 1..73: mol_type = other RNA
cctgtgacattcttcgacacgccccccatgctctttgtgttcattgccctgggccggtggctggaacacttgg

SEQ ID NO: 12783 - RNA, 73 nt, synthetic construct
  source 1..73: mol_type = other RNA
cctgtgacattcttcgacacgccccccatgctctttgtgttcattgccctgggccggtggctggaacatttgg

SEQ ID NO: 12784 - RNA, 74 nt, synthetic construct
  source 1..74: mol_type = other RNA
ccctgtgacattcttcgacacgccccccatgctctttgtgttcattgccctgggccggtggctggaacatttgg

SEQ ID NO: 12785 - RNA, 74 nt, synthetic construct
  source 1..74: mol_type = other RNA
ccctgtgacattcttcgacacgccccccatgctctttgtgttcattgccctgggccggtggctggaacacttgg

SEQ ID NO: 12786 - RNA, 75 nt, synthetic construct
  source 1..75: mol_type = other RNA
gccctgtgacattcttcgacacgccccccatgctctttgtgttcattgccctgggccggtggctggaacacttgg

SEQ ID NO: 12787 - RNA, 75 nt, synthetic construct
  source 1..75: mol_type = other RNA
gccctgtgacattcttcgacacgccccccatgctctttgtgttcattgccctgggccggtggctggaacatttgg

SEQ ID NO: 12788 - RNA, 76 nt, synthetic construct
  source 1..76: mol_type = other RNA
agccctgtgacattcttcgacacgccccccatgctctttgtgttcattgccctgggccggtggctggaacatttgg

SEQ ID NO: 12789 - RNA, 76 nt, synthetic construct
  source 1..76: mol_type = other RNA
agccctgtgacattcttcgacacgccccccatgctctttgtgttcattgccctgggccggtggctggaacacttgg

SEQ ID NO: 12790 - RNA, 77 nt, synthetic construct
  source 1..77: mol_type = other RNA
gagccctgtgacattcttcgacacgccccccatgctctttgtgttcattgccctgggccggtggctggaacacttgg

SEQ ID NO: 12791 - RNA, 77 nt, synthetic construct
  source 1..77: mol_type = other RNA
gagccctgtgacattcttcgacacgccccccatgctctttgtgttcattgccctgggccggtggctggaacatttgg

SEQ ID NO: 12792 - RNA, 78 nt, synthetic construct
  source 1..78: mol_type = other RNA
ggagccctgtgacattcttcgacacgccccccatgctctttgtgttcattgccctgggccggtggctggaacatttgg

SEQ ID NO: 12793 - RNA, 78 nt, synthetic construct
  source 1..78: mol_type = other RNA
ggagccctgtgacattcttcgacacgccccccatgctctttgtgttcattgccctgggccggtggctggaacacttgg

SEQ ID NO: 12794 - RNA, 79 nt, synthetic construct
  source 1..79: mol_type = other RNA
aggagccctgtgacattcttcgacacgccccccatgctctttgtgttcattgccctgggccggtggctggaacacttgg

SEQ ID NO: 12795 - RNA, 79 nt, synthetic construct
  source 1..79: mol_type = other RNA
aggagccctgtgacattcttcgacacgccccccatgctctttgtgttcattgccctgggccggtggctggaacatttgg

SEQ ID NO: 12796 - RNA, 80 nt, synthetic construct
  source 1..80: mol_type = other RNA
gaggagccctgtgacattcttcgacacgccccccatgctctttgtgttcattgccctgggccggtggctggaacacttgg

SEQ ID NO: 12797 - RNA, 80 nt, synthetic construct
  source 1..80: mol_type = other RNA
gaggagccctgtgacattcttcgacacgccccccatgctctttgtgttcattgccctgggccggtggctggaacatttgg

SEQ ID NO: 12798 - RNA, 81 nt, synthetic construct
  source 1..81: mol_type = other RNA
agaggagccctgtgacattcttcgacacgccccccatgctctttgtgttcattgccctgggccggtggctggaacatttgg

SEQ ID NO: 12799 - RNA, 81 nt, synthetic construct
  source 1..81: mol_type = other RNA
agaggagccctgtgacattcttcgacacgccccccatgctctttgtgttcattgccctgggccggtggctggaacacttgg

SEQ ID NO: 12800 - RNA, 82 nt, synthetic construct
  source 1..82: mol_type = other RNA
gagaggagccctgtgacattcttcgacacgccccccatgctctttgtgttcattgccctgggccggtggctggaacacttgg

SEQ ID NO: 12801 - RNA, 82 nt, synthetic construct
  source 1..82: mol_type = other RNA
gagaggagccctgtgacattcttcgacacgccccccatgctctttgtgttcattgccctgggccggtggctggaacatttgg

SEQ ID NO: 12802 - RNA, 83 nt, synthetic construct
  source 1..83: mol_type = other RNA
ggagaggagccctgtgacattcttcgacacgccccccatgctctttgtgttcattgccctgggccggtggctggaacacttgg

SEQ ID NO: 12803 - RNA, 83 nt, synthetic construct
  source 1..83: mol_type = other RNA
ggagaggagccctgtgacattcttcgacacgccccccatgctctttgtgttcattgccctgggccggtggctggaacatttgg

SEQ ID NO: 12804 - RNA, 84 nt, synthetic construct
  source 1..84: mol_type = other RNA
cggagaggagccctgtgacattcttcgacacgccccccatgctctttgtgttcattgccctgggccggtggctggaacacttgg

SEQ ID NO: 12805 - RNA, 84 nt, synthetic construct
  source 1..84: mol_type = other RNA
cggagaggagccctgtgacattcttcgacacgccccccatgctctttgtgttcattgccctgggccggtggctggaacatttgg

SEQ ID NO: 12806 - RNA, 85 nt, synthetic construct
  source 1..85: mol_type = other RNA
gcggagaggagccctgtgacattcttcgacacgccccccatgctctttgtgttcattgccctgggccggtggctggaacatttgg

SEQ ID NO: 12807 - RNA, 85 nt, synthetic construct
  source 1..85: mol_type = other RNA
gcggagaggagccctgtgacattcttcgacacgccccccatgctctttgtgttcattgccctgggccggtggctggaacacttgg

SEQ ID NO: 12808 - RNA, 86 nt, synthetic construct
  source 1..86: mol_type = other RNA
ggcggagaggagccctgtgacattcttcgacacgccccccatgctctttgtgttcattgccctgggccggtggctggaacacttgg

SEQ ID NO: 12809 - RNA, 86 nt, synthetic construct
  source 1..86: mol_type = other RNA
ggcggagaggagccctgtgacattcttcgacacgccccccatgctctttgtgttcattgccctgggccggtggctggaacatttgg

SEQ ID NO: 12810 - RNA, 87 nt, synthetic construct
  source 1..87: mol_type = other RNA
aggcggagaggagccctgtgacattcttcgacacgccccccatgctctttgtgttcattgccctgggccggtggctggaacacttgg

SEQ ID NO: 12811 - RNA, 87 nt, synthetic construct
  source 1..87: mol_type = other RNA
aggcggagaggagccctgtgacattcttcgacacgccccccatgctctttgtgttcattgccctgggccggtggctggaacatttgg

SEQ ID NO: 12812 - RNA, 88 nt, synthetic construct
  source 1..88: mol_type = other RNA
aaggcggagaggagccctgtgacattcttcgacacgccccccatgctctttgtgttcattgccctgggccggtggctggaacacttgg

SEQ ID NO: 12813 - RNA, 88 nt, synthetic construct
  source 1..88: mol_type = other RNA
aaggcggagaggagccctgtgacattcttcgacacgccccccatgctctttgtgttcattgccctgggccggtggctggaacatttgg

SEQ ID NO: 12814 - RNA, 89 nt, synthetic construct
  source 1..89: mol_type = other RNA
gaaggcggagaggagccctgtgacattcttcgacacgccccccatgctctttgtgttcattgccctgggccggtggctggaacatttgg

SEQ ID NO: 12815 - RNA, 89 nt, synthetic construct
  source 1..89: mol_type = other RNA
gaaggcggagaggagccctgtgacattcttcgacacgccccccatgctctttgtgttcattgccctgggccggtggctggaacacttgg

SEQ ID NO: 12816 - RNA, 90 nt, synthetic construct
  source 1..90: mol_type = other RNA
agaaggcggagaggagccctgtgacattcttcgacacgccccccatgctctttgtgttcattgccctgggccggtggctggaacacttgg

SEQ ID NO: 12817 - RNA, 90 nt, synthetic construct
  source 1..90: mol_type = other RNA
agaaggcggagaggagccctgtgacattcttcgacacgccccccatgctctttgtgttcattgccctgggccggtggctggaacatttgg

SEQ ID NO: 12818 - RNA, 91 nt, synthetic construct
  source 1..91: mol_type = other RNA
gagaaggcggagaggagccctgtgacattcttcgacacgccccccatgctctttgtgttcattgccctgggccggtggctggaacacttgg

SEQ ID NO: 12819 - RNA, 91 nt, synthetic construct
  source 1..91: mol_type = other RNA
gagaaggcggagaggagccctgtgacattcttcgacacgccccccatgctctttgtgttcattgccctgggccggtggctggaacatttgg

SEQ ID NO: 12820 - RNA, 92 nt, synthetic construct
  source 1..92: mol_type = other RNA
tgagaaggcggagaggagccctgtgacattcttcgacacgccccccatgctctttgtgttcattgccctgggccggtggctggaacatttgg

SEQ ID NO: 12821 - RNA, 92 nt, synthetic construct
  source 1..92: mol_type = other RNA
tgagaaggcggagaggagccctgtgacattcttcgacacgccccccatgctctttgtgttcattgccctgggccggtggctggaacacttgg

SEQ ID NO: 12822 - RNA, 93 nt, synthetic construct
  source 1..93: mol_type = other RNA
ctgagaaggcggagaggagccctgtgacattcttcgacacgccccccatgctctttgtgttcattgccctgggccggtggctggaacacttgg

SEQ ID NO: 12823 - RNA, 93 nt, synthetic construct
  source 1..93: mol_type = other RNA
ctgagaaggcggagaggagccctgtgacattcttcgacacgccccccatgctctttgtgttcattgccctgggccggtggctggaacatttgg

SEQ ID NO: 12824 - RNA, 94 nt, synthetic construct
  source 1..94: mol_type = other RNA
gctgagaaggcggagaggagccctgtgacattcttcgacacgccccccatgctctttgtgttcattgccctgggccggtggctggaacacttgg

SEQ ID NO: 12825 - RNA, 94 nt, synthetic construct
  source 1..94: mol_type = other RNA
gctgagaaggcggagaggagccctgtgacattcttcgacacgccccccatgctctttgtgttcattgccctgggccggtggctggaacatttgg

SEQ ID NO: 12826 - RNA, 95 nt, synthetic construct
  source 1..95: mol_type = other RNA
ggctgagaaggcggagaggagccctgtgacattcttcgacacgccccccatgctctttgtgttcattgccctgggccggtggctggaacatttgg

SEQ ID NO: 12827 - RNA, 95 nt, synthetic construct
  source 1..95: mol_type = other RNA
ggctgagaaggcggagaggagccctgtgacattcttcgacacgccccccatgctctttgtgttcattgccctgggccggtggctggaacacttgg

SEQ ID NO: 12828 - RNA, 96 nt, synthetic construct
  source 1..96: mol_type = other RNA
tggctgagaaggcggagaggagccctgtgacattcttcgacacgccccccatgctctttgtgttcattgccctgggccggtggctggaacacttgg

SEQ ID NO: 12829 - RNA, 96 nt, synthetic construct
  source 1..96: mol_type = other RNA
tggctgagaaggcggagaggagccctgtgacattcttcgacacgccccccatgctctttgtgttcattgccctgggccggtggctggaacatttgg

SEQ ID NO: 12830 - RNA, 97 nt, synthetic construct
  source 1..97: mol_type = other RNA
gtggctgagaaggcggagaggagccctgtgacattcttcgacacgccccccatgctctttgtgttcattgccctgggccggtggctggaacacttgg

SEQ ID NO: 12831 - RNA, 97 nt, synthetic construct
  source 1..97: mol_type = other RNA
gtggctgagaaggcggagaggagccctgtgacattcttcgacacgccccccatgctctttgtgttcattgccctgggccggtggctggaacatttgg

SEQ ID NO: 12832 - RNA, 98 nt, synthetic construct
  source 1..98: mol_type = other RNA
tgtggctgagaaggcggagaggagccctgtgacattcttcgacacgccccccatgctctttgtgttcattgccctgggccggtggctggaacacttgg

SEQ ID NO: 12833 - RNA, 98 nt, synthetic construct
  source 1..98: mol_type = other RNA
tgtggctgagaaggcggagaggagccctgtgacattcttcgacacgccccccatgctctttgtgttcattgccctgggccggtggctggaacatttgg

SEQ ID NO: 12834 - RNA, 99 nt, synthetic construct
  source 1..99: mol_type = other RNA
ctgtggctgagaaggcggagaggagccctgtgacattcttcgacacgccccccatgctctttgtgttcattgccctgggccggtggctggaacatttgg

SEQ ID NO: 12835 - RNA, 99 nt, synthetic construct
  source 1..99: mol_type = other RNA
ctgtggctgagaaggcggagaggagccctgtgacattcttcgacacgccccccatgctctttgtgttcattgccctgggccggtggctggaacacttgg

SEQ ID NO: 12836 - RNA, 100 nt, synthetic construct
  source 1..100: mol_type = other RNA
gctgtggctgagaaggcggagaggagccctgtgacattcttcgacacgccccccatgctctttgtgttcattgccctgggccggtggctggaacatttgg

SEQ ID NO: 12837 - RNA, 100 nt, synthetic construct
  source 1..100: mol_type = other RNA
gctgtggctgagaaggcggagaggagccctgtgacattcttcgacacgccccccatgctctttgtgttcattgccctgggccggtggctggaacacttgg

SEQ ID NO: 12838 - RNA, 20 nt, synthetic construct
  source 1..20: mol_type = other RNA
gtggctggaacatttggcaa

SEQ ID NO: 12839 - RNA, 20 nt, synthetic construct
  source 1..20: mol_type = other RNA
ggccggtggctggaacattt

SEQ ID NO: 12840 - RNA, 20 nt, synthetic construct
  source 1..20: mol_type = other RNA
gggccggtggctggaacatt

SEQ ID NO: 12841 - RNA, 16 nt, synthetic construct
  source 1..16: mol_type = other RNA
tgttacctttgccaag

SEQ ID NO: 12842 - RNA, 17 nt, synthetic construct
  source 1..17: mol_type = other RNA
ctgttacctttgccaag

SEQ ID NO: 12843 - RNA, 18 nt, synthetic construct
  source 1..18: mol_type = other RNA
gctgttacctttgccaag

SEQ ID NO: 12844 - RNA, 19 nt, synthetic construct
  source 1..19: mol_type = other RNA
tgctgttacctttgccaag

SEQ ID NO: 12845 - RNA, 20 nt, synthetic construct
  source 1..20: mol_type = other RNA
ctgctgttacctttgccaag

SEQ ID NO: 12846 - RNA, 21 nt, synthetic construct
  source 1..21: mol_type = other RNA
gctgctgttacctttgccaag

SEQ ID NO: 12847 - RNA, 22 nt, synthetic construct
  source 1..22: mol_type = other RNA
agctgctgttacctttgccaag

SEQ ID NO: 12848-12851 - skipped (4 entries)

SEQ ID NO: 12852 - RNA, 10 nt, synthetic construct
  source 1..10: mol_type = other RNA
ggcaaaggta

SEQ ID NO: 12853 - RNA, 11 nt, synthetic construct
  source 1..11: mol_type = other RNA
ggcaaaggtaa

SEQ ID NO: 12854 - RNA, 12 nt, synthetic construct
  source 1..12: mol_type = other RNA
ggcaaaggtaac

SEQ ID NO: 12855 - RNA, 13 nt, synthetic construct
  source 1..13: mol_type = other RNA
ggcaaaggtaaca

SEQ ID NO: 12856 - RNA, 14 nt, synthetic construct
  source 1..14: mol_type = other RNA
ggcaaaggtaacag

SEQ ID NO: 12857 - RNA, 15 nt, synthetic construct
  source 1..15: mol_type = other RNA
ggcaaaggtaacagc

SEQ ID NO: 12858 - RNA, 16 nt, synthetic construct
  source 1..16: mol_type = other RNA
ggcaaaggtaacagca

SEQ ID NO: 12859 - RNA, 17 nt, synthetic construct
  source 1..17: mol_type = other RNA
ggcaaaggtaacagcag

SEQ ID NO: 12860 - RNA, 18 nt, synthetic construct
  source 1..18: mol_type = other RNA
ggcaaaggtaacagcagc

SEQ ID NO: 12861 - RNA, 19 nt, synthetic construct
  source 1..19: mol_type = other RNA
ggcaaaggtaacagcagct

SEQ ID NO: 12862 - RNA, 16 nt, synthetic construct
  source 1..16: mol_type = other RNA
ggtggctggaacactt

SEQ ID NO: 12863 - RNA, 17 nt, synthetic construct
  source 1..17: mol_type = other RNA
cggtggctggaacactt

SEQ ID NO: 12864 - RNA, 18 nt, synthetic construct
  source 1..18: mol_type = other RNA
ccggtggctggaacactt

SEQ ID NO: 12865 - RNA, 19 nt, synthetic construct
  source 1..19: mol_type = other RNA
gccggtggctggaacactt

SEQ ID NO: 12866 - RNA, 20 nt, synthetic construct
  source 1..20: mol_type = other RNA
ggccggtggctggaacactt

SEQ ID NO: 12867 - RNA, 21 nt, synthetic construct
  source 1..21: mol_type = other RNA
gggccggtggctggaacactt

SEQ ID NO: 12868 - RNA, 22 nt, synthetic construct
  source 1..22: mol_type = other RNA
tgggccggtggctggaacactt

SEQ ID NO: 12869 - RNA, 23 nt, synthetic construct
  source 1..23: mol_type = other RNA
ctgggccggtggctggaacactt

SEQ ID NO: 12870 - RNA, 24 nt, synthetic construct
  source 1..24: mol_type = other RNA
cctgggccggtggctggaacactt

SEQ ID NO: 12871 - RNA, 25 nt, synthetic construct
  source 1..25: mol_type = other RNA
ccctgggccggtggctggaacactt

SEQ ID NO: 12872 - RNA, 26 nt, synthetic construct
  source 1..26: mol_type = other RNA
gccctgggccggtggctggaacactt

SEQ ID NO: 12873 - RNA, 27 nt, synthetic construct
  source 1..27: mol_type = other RNA
tgccctgggccggtggctggaacactt

SEQ ID NO: 12874 - RNA, 28 nt, synthetic construct
  source 1..28: mol_type = other RNA
ttgccctgggccggtggctggaacactt

SEQ ID NO: 12875 - RNA, 29 nt, synthetic construct
  source 1..29: mol_type = other RNA
attgccctgggccggtggctggaacactt

SEQ ID NO: 12876 - RNA, 30 nt, synthetic construct
  source 1..30: mol_type = other RNA
cattgccctgggccggtggctggaacactt

SEQ ID NO: 12877 - RNA, 31 nt, synthetic construct
  source 1..31: mol_type = other RNA
tcattgccctgggccggtggctggaacactt

SEQ ID NO: 12878 - RNA, 32 nt, synthetic construct
  source 1..32: mol_type = other RNA
ttcattgccctgggccggtggctggaacactt

SEQ ID NO: 12879 - RNA, 33 nt, synthetic construct
  source 1..33: mol_type = other RNA
gttcattgccctgggccggtggctggaacactt

SEQ ID NO: 12880 - RNA, 34 nt, synthetic construct
  source 1..34: mol_type = other RNA
tgttcattgccctgggccggtggctggaacactt

SEQ ID NO: 12881 - RNA, 35 nt, synthetic construct
  source 1..35: mol_type = other RNA
gtgttcattgccctgggccggtggctggaacactt

SEQ ID NO: 12882 - RNA, 36 nt, synthetic construct
  source 1..36: mol_type = other RNA
tgtgttcattgccctgggccggtggctggaacactt

SEQ ID NO: 12883 - RNA, 37 nt, synthetic construct
  source 1..37: mol_type = other RNA
ttgtgttcattgccctgggccggtggctggaacactt

SEQ ID NO: 12884 - RNA, 38 nt, synthetic construct
  source 1..38: mol_type = other RNA
tttgtgttcattgccctgggccggtggctggaacactt

SEQ ID NO: 12885 - RNA, 39 nt, synthetic construct
  source 1..39: mol_type = other RNA
ctttgtgttcattgccctgggccggtggctggaacactt

SEQ ID NO: 12886 - RNA, 40 nt, synthetic construct
  source 1..40: mol_type = other RNA
tctttgtgttcattgccctgggccggtggctggaacactt

SEQ ID NO: 12887 - RNA, 41 nt, synthetic construct
  source 1..41: mol_type = other RNA
ctctttgtgttcattgccctgggccggtggctggaacactt

SEQ ID NO: 12888 - RNA, 42 nt, synthetic construct
  source 1..42: mol_type = other RNA
gctctttgtgttcattgccctgggccggtggctggaacactt

SEQ ID NO: 12889 - RNA, 43 nt, synthetic construct
  source 1..43: mol_type = other RNA
tgctctttgtgttcattgccctgggccggtggctggaacactt

SEQ ID NO: 12890 - RNA, 44 nt, synthetic construct
  source 1..44: mol_type = other RNA
atgctctttgtgttcattgccctgggccggtggctggaacactt

SEQ ID NO: 12891 - RNA, 45 nt, synthetic construct
  source 1..45: mol_type = other RNA
catgctctttgtgttcattgccctgggccggtggctggaacactt

SEQ ID NO: 12892 - RNA, 46 nt, synthetic construct
  source 1..46: mol_type = other RNA
ccatgctctttgtgttcattgccctgggccggtggctggaacactt

SEQ ID NO: 12893 - RNA, 47 nt, synthetic construct
  source 1..47: mol_type = other RNA
cccatgctctttgtgttcattgccctgggccggtggctggaacactt

SEQ ID NO: 12894 - RNA, 48 nt, synthetic construct
  source 1..48: mol_type = other RNA
ccccatgctctttgtgttcattgccctgggccggtggctggaacactt

SEQ ID NO: 12895 - RNA, 49 nt, synthetic construct
  source 1..49: mol_type = other RNA
cccccatgctctttgtgttcattgccctgggccggtggctggaacactt

SEQ ID NO: 12896 - RNA, 50 nt, synthetic construct
  source 1..50: mol_type = other RNA
ccccccatgctctttgtgttcattgccctgggccggtggctggaacactt

SEQ ID NO: 12897 - RNA, 51 nt, synthetic construct
  source 1..51: mol_type = other RNA
gccccccatgctctttgtgttcattgccctgggccggtggctggaacactt

SEQ ID NO: 12898 - RNA, 52 nt, synthetic construct
  source 1..52: mol_type = other RNA
cgccccccatgctctttgtgttcattgccctgggccggtggctggaacactt

SEQ ID NO: 12899 - RNA, 53 nt, synthetic construct
  source 1..53: mol_type = other RNA
acgccccccatgctctttgtgttcattgccctgggccggtggctggaacactt

SEQ ID NO: 12900 - RNA, 54 nt, synthetic construct
  source 1..54: mol_type = other RNA
cacgccccccatgctctttgtgttcattgccctgggccggtggctggaacactt

SEQ ID NO: 12901 - RNA, 55 nt, synthetic construct
  source 1..55: mol_type = other RNA
acacgccccccatgctctttgtgttcattgccctgggccggtggctggaacactt

SEQ ID NO: 12902 - RNA, 56 nt, synthetic construct
  source 1..56: mol_type = other RNA
gacacgccccccatgctctttgtgttcattgccctgggccggtggctggaacactt

SEQ ID NO: 12903 - RNA, 57 nt, synthetic construct
  source 1..57: mol_type = other RNA
cgacacgccccccatgctctttgtgttcattgccctgggccggtggctggaacactt

SEQ ID NO: 12904 - RNA, 58 nt, synthetic construct
  source 1..58: mol_type = other RNA
tcgacacgccccccatgctctttgtgttcattgccctgggccggtggctggaacactt

SEQ ID NO: 12905 - RNA, 59 nt, synthetic construct
  source 1..59: mol_type = other RNA
ttcgacacgccccccatgctctttgtgttcattgccctgggccggtggctggaacactt

SEQ ID NO: 12906 - RNA, 60 nt, synthetic construct
  source 1..60: mol_type = other RNA
cttcgacacgccccccatgctctttgtgttcattgccctgggccggtggctggaacactt

SEQ ID NO: 12907 - RNA, 61 nt, synthetic construct
  source 1..61: mol_type = other RNA
tcttcgacacgccccccatgctctttgtgttcattgccctgggccggtggctggaacactt

SEQ ID NO: 12908 - RNA, 62 nt, synthetic construct
  source 1..62: mol_type = other RNA
ttcttcgacacgccccccatgctctttgtgttcattgccctgggccggtggctggaacactt

SEQ ID NO: 12909 - RNA, 63 nt, synthetic construct
  source 1..63: mol_type = other RNA
attcttcgacacgccccccatgctctttgtgttcattgccctgggccggtggctggaacactt

SEQ ID NO: 12910 - RNA, 64 nt, synthetic construct
  source 1..64: mol_type = other RNA
cattcttcgacacgccccccatgctctttgtgttcattgccctgggccggtggctggaacactt

SEQ ID NO: 12911 - RNA, 65 nt, synthetic construct
  source 1..65: mol_type = other RNA
acattcttcgacacgccccccatgctctttgtgttcattgccctgggccggtggctggaacactt

SEQ ID NO: 12912 - RNA, 66 nt, synthetic construct
  source 1..66: mol_type = other RNA
gacattcttcgacacgccccccatgctctttgtgttcattgccctgggccggtggctggaacactt

SEQ ID NO: 12913 - RNA, 67 nt, synthetic construct
  source 1..67: mol_type = other RNA
tgacattcttcgacacgccccccatgctctttgtgttcattgccctgggccggtggctggaacactt

SEQ ID NO: 12914 - RNA, 68 nt, synthetic construct
  source 1..68: mol_type = other RNA
gtgacattcttcgacacgccccccatgctctttgtgttcattgccctgggccggtggctggaacactt

SEQ ID NO: 12915 - RNA, 69 nt, synthetic construct
  source 1..69: mol_type = other RNA
tgtgacattcttcgacacgccccccatgctctttgtgttcattgccctgggccggtggctggaacactt

SEQ ID NO: 12916 - RNA, 70 nt, synthetic construct
  source 1..70: mol_type = other RNA
ctgtgacattcttcgacacgccccccatgctctttgtgttcattgccctgggccggtggctggaacactt

SEQ ID NO: 12917 - RNA, 71 nt, synthetic construct
  source 1..71: mol_type = other RNA
cctgtgacattcttcgacacgccccccatgctctttgtgttcattgccctgggccggtggctggaacactt

SEQ ID NO: 12918 - RNA, 72 nt, synthetic construct
  source 1..72: mol_type = other RNA
ccctgtgacattcttcgacacgccccccatgctctttgtgttcattgccctgggccggtggctggaacactt

SEQ ID NO: 12919 - RNA, 73 nt, synthetic construct
  source 1..73: mol_type = other RNA
gccctgtgacattcttcgacacgccccccatgctctttgtgttcattgccctgggccggtggctggaacactt

SEQ ID NO: 12920 - RNA, 74 nt, synthetic construct
  source 1..74: mol_type = other RNA
agccctgtgacattcttcgacacgccccccatgctctttgtgttcattgccctgggccggtggctggaacactt

SEQ ID NO: 12921 - RNA, 75 nt, synthetic construct
  source 1..75: mol_type = other RNA
gagccctgtgacattcttcgacacgccccccatgctctttgtgttcattgccctgggccggtggctggaacactt

SEQ ID NO: 12922 - RNA, 76 nt, synthetic construct
  source 1..76: mol_type = other RNA
ggagccctgtgacattcttcgacacgccccccatgctctttgtgttcattgccctgggccggtggctggaacactt

SEQ ID NO: 12923 - RNA, 77 nt, synthetic construct
  source 1..77: mol_type = other RNA
aggagccctgtgacattcttcgacacgccccccatgctctttgtgttcattgccctgggccggtggctggaacactt

SEQ ID NO: 12924 - RNA, 78 nt, synthetic construct
  source 1..78: mol_type = other RNA
gaggagccctgtgacattcttcgacacgccccccatgctctttgtgttcattgccctgggccggtggctggaacactt

SEQ ID NO: 12925 - RNA, 79 nt, synthetic construct
  source 1..79: mol_type = other RNA
agaggagccctgtgacattcttcgacacgccccccatgctctttgtgttcattgccctgggccggtggctggaacactt

SEQ ID NO: 12926 - RNA, 80 nt, synthetic construct
  source 1..80: mol_type = other RNA
gagaggagccctgtgacattcttcgacacgccccccatgctctttgtgttcattgccctgggccggtggctggaacactt

SEQ ID NO: 12927 - RNA, 81 nt, synthetic construct
  source 1..81: mol_type = other RNA
ggagaggagccctgtgacattcttcgacacgccccccatgctctttgtgttcattgccctgggccggtggctggaacactt

SEQ ID NO: 12928 - RNA, 82 nt, synthetic construct
  source 1..82: mol_type = other RNA
cggagaggagccctgtgacattcttcgacacgccccccatgctctttgtgttcattgccctgggccggtggctggaacactt

SEQ ID NO: 12929 - RNA, 83 nt, synthetic construct
  source 1..83: mol_type = other RNA
gcggagaggagccctgtgacattcttcgacacgccccccatgctctttgtgttcattgccctgggccggtggctggaacactt

SEQ ID NO: 12930 - RNA, 84 nt, synthetic construct
  source 1..84: mol_type = other RNA
ggcggagaggagccctgtgacattcttcgacacgccccccatgctctttgtgttcattgccctgggccggtggctggaacactt

SEQ ID NO: 12931 - RNA, 85 nt, synthetic construct
  source 1..85: mol_type = other RNA
aggcggagaggagccctgtgacattcttcgacacgccccccatgctctttgtgttcattgccctgggccggtggctggaacactt

SEQ ID NO: 12932 - RNA, 86 nt, synthetic construct
  source 1..86: mol_type = other RNA
aaggcggagaggagccctgtgacattcttcgacacgccccccatgctctttgtgttcattgccctgggccggtggctggaacactt

SEQ ID NO: 12933 - RNA, 87 nt, synthetic construct
  source 1..87: mol_type = other RNA
gaaggcggagaggagccctgtgacattcttcgacacgccccccatgctctttgtgttcattgccctgggccggtggctggaacactt

SEQ ID NO: 12934 - RNA, 88 nt, synthetic construct
  source 1..88: mol_type = other RNA
agaaggcggagaggagccctgtgacattcttcgacacgccccccatgctctttgtgttcattgccctgggccggtggctggaacactt

SEQ ID NO: 12935 - RNA, 89 nt, synthetic construct
  source 1..89: mol_type = other RNA
gagaaggcggagaggagccctgtgacattcttcgacacgccccccatgctctttgtgttcattgccctgggccggtggctggaacactt

SEQ ID NO: 12936 - RNA, 90 nt, synthetic construct
  source 1..90: mol_type = other RNA
tgagaaggcggagaggagccctgtgacattcttcgacacgccccccatgctctttgtgttcattgccctgggccggtggctggaacactt

SEQ ID NO: 12937 - RNA, 91 nt, synthetic construct
  source 1..91: mol_type = other RNA
ctgagaaggcggagaggagccctgtgacattcttcgacacgccccccatgctctttgtgttcattgccctgggccggtggctggaacactt

SEQ ID NO: 12938 - RNA, 92 nt, synthetic construct
  source 1..92: mol_type = other RNA
gctgagaaggcggagaggagccctgtgacattcttcgacacgccccccatgctctttgtgttcattgccctgggccggtggctggaacactt

SEQ ID NO: 12939 - RNA, 93 nt, synthetic construct
  source 1..93: mol_type = other RNA
ggctgagaaggcggagaggagccctgtgacattcttcgacacgccccccatgctctttgtgttcattgccctgggccggtggctggaacactt

SEQ ID NO: 12940 - RNA, 94 nt, synthetic construct
  source 1..94: mol_type = other RNA
tggctgagaaggcggagaggagccctgtgacattcttcgacacgccccccatgctctttgtgttcattgccctgggccggtggctggaacactt

SEQ ID NO: 12941 - RNA, 95 nt, synthetic construct
  source 1..95: mol_type = other RNA
gtggctgagaaggcggagaggagccctgtgacattcttcgacacgccccccatgctctttgtgttcattgccctgggccggtggctggaacactt

SEQ ID NO: 12942 - RNA, 96 nt, synthetic construct
  source 1..96: mol_type = other RNA
tgtggctgagaaggcggagaggagccctgtgacattcttcgacacgccccccatgctctttgtgttcattgccctgggccggtggctggaacactt

SEQ ID NO: 12943 - RNA, 97 nt, synthetic construct
  source 1..97: mol_type = other RNA
ctgtggctgagaaggcggagaggagccctgtgacattcttcgacacgccccccatgctctttgtgttcattgccctgggccggtggctggaacactt

SEQ ID NO: 12944 - RNA, 98 nt, synthetic construct
  source 1..98: mol_type = other RNA
gctgtggctgagaaggcggagaggagccctgtgacattcttcgacacgccccccatgctctttgtgttcattgccctgggccggtggctggaacactt

SEQ ID NO: 12945 - RNA, 99 nt, synthetic construct
  source 1..99: mol_type = other RNA
tgctgtggctgagaaggcggagaggagccctgtgacattcttcgacacgccccccatgctctttgtgttcattgccctgggccggtggctggaacactt

SEQ ID NO: 12946 - RNA, 100 nt, synthetic construct
  source 1..100: mol_type = other RNA
ttgctgtggctgagaaggcggagaggagccctgtgacattcttcgacacgccccccatgctctttgtgttcattgccctgggccggtggctggaacactt

SEQ ID NO: 12947 - RNA, 16 nt, synthetic construct
  source 1..16: mol_type = other RNA
ctttgccaagtgttcc

SEQ ID NO: 12948 - RNA, 17 nt, synthetic construct
  source 1..17: mol_type = other RNA
cctttgccaagtgttcc

SEQ ID NO: 12949 - RNA, 18 nt, synthetic construct
  source 1..18: mol_type = other RNA
acctttgccaagtgttcc

SEQ ID NO: 12950 - RNA, 19 nt, synthetic construct
  source 1..19: mol_type = other RNA
tacctttgccaagtgttcc

SEQ ID NO: 12951 - RNA, 20 nt, synthetic construct
  source 1..20: mol_type = other RNA
ttacctttgccaagtgttcc

SEQ ID NO: 12952 - RNA, 21 nt, synthetic construct
  source 1..21: mol_type = other RNA
gttacctttgccaagtgttcc

SEQ ID NO: 12953 - RNA, 22 nt, synthetic construct
  source 1..22: mol_type = other RNA
tgttacctttgccaagtgttcc

SEQ ID NO: 12954-12958 - skipped (5 entries)

SEQ ID NO: 12959 - RNA, 10 nt, synthetic construct
  source 1..10: mol_type = other RNA
acacttggca

SEQ ID NO: 12960 - RNA, 11 nt, synthetic construct
  source 1..11: mol_type = other RNA
acacttggcaa

SEQ ID NO: 12961 - RNA, 12 nt, synthetic construct
  source 1..12: mol_type = other RNA
acacttggcaaa

SEQ ID NO: 12962 - RNA, 13 nt, synthetic construct
  source 1..13: mol_type = other RNA
acacttggcaaag

SEQ ID NO: 12963 - RNA, 14 nt, synthetic construct
  source 1..14: mol_type = other RNA
acacttggcaaagg

SEQ ID NO: 12964 - RNA, 15 nt, synthetic construct
  source 1..15: mol_type = other RNA
acacttggcaaaggt

SEQ ID NO: 12965 - RNA, 16 nt, synthetic construct
  source 1..16: mol_type = other RNA
acacttggcaaaggta

SEQ ID NO: 12966 - RNA, 17 nt, synthetic construct
  source 1..17: mol_type = other RNA
acacttggcaaaggtaa

SEQ ID NO: 12967 - RNA, 18 nt, synthetic construct
  source 1..18: mol_type = other RNA
acacttggcaaaggtaac

SEQ ID NO: 12968 - RNA, 19 nt, synthetic construct
  source 1..19: mol_type = other RNA
acacttggcaaaggtaaca

SEQ ID NO: 12969 - RNA, 10 nt, synthetic construct
  source 1..10: mol_type = other RNA
ggtggttaga

SEQ ID NO: 12970 - RNA, 10 nt, synthetic construct
  source 1..10: mol_type = other RNA
ggtggctgga

SEQ ID NO: 12971 - RNA, 10 nt, synthetic construct
  source 1..10: mol_type = other RNA
ggtggttgga

SEQ ID NO: 12972 - RNA, 11 nt, synthetic construct
  source 1..11: mol_type = other RNA
cggtggttaga

SEQ ID NO: 12973 - RNA, 11 nt, synthetic construct
  source 1..11: mol_type = other RNA
cggtggctgga

SEQ ID NO: 12974 - RNA, 11 nt, synthetic construct
  source 1..11: mol_type = other RNA
cggtggttgga

SEQ ID NO: 12975 - RNA, 12 nt, synthetic construct
  source 1..12: mol_type = other RNA
ccggtggttaga

SEQ ID NO: 12976 - RNA, 12 nt, synthetic construct
  source 1..12: mol_type = other RNA
ccggtggttgga

SEQ ID NO: 12977 - RNA, 12 nt, synthetic construct
  source 1..12: mol_type = other RNA
ccggtggctgga

SEQ ID NO: 12978 - RNA, 13 nt, synthetic construct
  source 1..13: mol_type = other RNA
gccggtggttgga

SEQ ID NO: 12979 - RNA, 13 nt, synthetic construct
  source 1..13: mol_type = other RNA
gccggtggttaga

SEQ ID NO: 12980 - RNA, 13 nt, synthetic construct
  source 1..13: mol_type = other RNA
gccggtggctgga

SEQ ID NO: 12981 - RNA, 14 nt, synthetic construct
  source 1..14: mol_type = other RNA
ggccggtggctgga

SEQ ID NO: 12982 - RNA, 14 nt, synthetic construct
  source 1..14: mol_type = other RNA
ggccggtggttgga

SEQ ID NO: 12983 - RNA, 14 nt, synthetic construct
  source 1..14: mol_type = other RNA
ggccggtggttaga

SEQ ID NO: 12984 - RNA, 15 nt, synthetic construct
  source 1..15: mol_type = other RNA
gggccggtggctgga

SEQ ID NO: 12985 - RNA, 15 nt, synthetic construct
  source 1..15: mol_type = other RNA
gggccggtggttgga

SEQ ID NO: 12986 - RNA, 15 nt, synthetic construct
  source 1..15: mol_type = other RNA
gggccggtggttaga

SEQ ID NO: 12987 - RNA, 16 nt, synthetic construct
  source 1..16: mol_type = other RNA
tgggccggtggttaga

SEQ ID NO: 12988 - RNA, 16 nt, synthetic construct
  source 1..16: mol_type = other RNA
tgggccggtggctgga

SEQ ID NO: 12989 - RNA, 16 nt, synthetic construct
  source 1..16: mol_type = other RNA
tgggccggtggttgga

SEQ ID NO: 12990 - RNA, 17 nt, synthetic construct
  source 1..17: mol_type = other RNA
ctgggccggtggttgga

SEQ ID NO: 12991 - RNA, 17 nt, synthetic construct
  source 1..17: mol_type = other RNA
ctgggccggtggctgga

SEQ ID NO: 12992 - RNA, 17 nt, synthetic construct
  source 1..17: mol_type = other RNA
ctgggccggtggttaga

SEQ ID NO: 12993 - RNA, 18 nt, synthetic construct
  source 1..18: mol_type = other RNA
cctgggccggtggttgga

SEQ ID NO: 12994 - RNA, 18 nt, synthetic construct
  source 1..18: mol_type = other RNA
cctgggccggtggctgga

SEQ ID NO: 12995 - RNA, 18 nt, synthetic construct
  source 1..18: mol_type = other RNA
cctgggccggtggttaga

SEQ ID NO: 12996 - RNA, 19 nt, synthetic construct
  source 1..19: mol_type = other RNA
ccctgggccggtggttgga

SEQ ID NO: 12997 - RNA, 19 nt, synthetic construct
  source 1..19: mol_type = other RNA
ccctgggccggtggttaga

SEQ ID NO: 12998 - RNA, 19 nt, synthetic construct
  source 1..19: mol_type = other RNA
ccctgggccggtggctgga

SEQ ID NO: 12999 - RNA, 20 nt, synthetic construct
  source 1..20: mol_type = other RNA
gccctgggccggtggctgga

SEQ ID NO: 13000 - RNA, 20 nt, synthetic construct
  source 1..20: mol_type = other RNA
gccctgggccggtggttgga

SEQ ID NO: 13001 - RNA, 20 nt, synthetic construct
  source 1..20: mol_type = other RNA
gccctgggccggtggttaga

SEQ ID NO: 13002 - RNA, 21 nt, synthetic construct
  source 1..21: mol_type = other RNA
tgccctgggccggtggttaga

SEQ ID NO: 13003 - RNA, 21 nt, synthetic construct
  source 1..21: mol_type = other RNA
tgccctgggccggtggctgga

SEQ ID NO: 13004 - RNA, 21 nt, synthetic construct
  source 1..21: mol_type = other RNA
tgccctgggccggtggttgga

SEQ ID NO: 13005 - RNA, 22 nt, synthetic construct
  source 1..22: mol_type = other RNA
ttgccctgggccggtggctgga

SEQ ID NO: 13006 - RNA, 22 nt, synthetic construct
  source 1..22: mol_type = other RNA
ttgccctgggccggtggttaga

SEQ ID NO: 13007 - RNA, 22 nt, synthetic construct
  source 1..22: mol_type = other RNA
ttgccctgggccggtggttgga

SEQ ID NO: 13008 - RNA, 23 nt, synthetic construct
  source 1..23: mol_type = other RNA
attgccctgggccggtggttgga

SEQ ID NO: 13009 - RNA, 23 nt, synthetic construct
  source 1..23: mol_type = other RNA
attgccctgggccggtggctgga

SEQ ID NO: 13010 - RNA, 23 nt, synthetic construct
  source 1..23: mol_type = other RNA
attgccctgggccggtggttaga

SEQ ID NO: 13011 - RNA, 24 nt, synthetic construct
  source 1..24: mol_type = other RNA
cattgccctgggccggtggttgga

SEQ ID NO: 13012 - RNA, 24 nt, synthetic construct
  source 1..24: mol_type = other RNA
cattgccctgggccggtggttaga

SEQ ID NO: 13013 - RNA, 24 nt, synthetic construct
  source 1..24: mol_type = other RNA
cattgccctgggccggtggctgga

SEQ ID NO: 13014 - RNA, 25 nt, synthetic construct
  source 1..25: mol_type = other RNA
tcattgccctgggccggtggctgga

SEQ ID NO: 13015 - RNA, 25 nt, synthetic construct
  source 1..25: mol_type = other RNA
tcattgccctgggccggtggttaga

SEQ ID NO: 13016 - RNA, 25 nt, synthetic construct
  source 1..25: mol_type = other RNA
tcattgccctgggccggtggttgga

SEQ ID NO: 13017 - RNA, 26 nt, synthetic construct
  source 1..26: mol_type = other RNA
ttcattgccctgggccggtggttaga

SEQ ID NO: 13018 - RNA, 26 nt, synthetic construct
  source 1..26: mol_type = other RNA
ttcattgccctgggccggtggctgga

SEQ ID NO: 13019 - RNA, 26 nt, synthetic construct
  source 1..26: mol_type = other RNA
ttcattgccctgggccggtggttgga

SEQ ID NO: 13020 - RNA, 27 nt, synthetic construct
  source 1..27: mol_type = other RNA
gttcattgccctgggccggtggttaga

SEQ ID NO: 13021 - RNA, 27 nt, synthetic construct
  source 1..27: mol_type = other RNA
gttcattgccctgggccggtggttgga

SEQ ID NO: 13022 - RNA, 27 nt, synthetic construct
  source 1..27: mol_type = other RNA
gttcattgccctgggccggtggctgga

SEQ ID NO: 13023 - RNA, 28 nt, synthetic construct
  source 1..28: mol_type = other RNA
tgttcattgccctgggccggtggctgga

SEQ ID NO: 13024 - RNA, 28 nt, synthetic construct
  source 1..28: mol_type = other RNA
tgttcattgccctgggccggtggttgga

SEQ ID NO: 13025 - RNA, 28 nt, synthetic construct
  source 1..28: mol_type = other RNA
tgttcattgccctgggccggtggttaga

SEQ ID NO: 13026 - RNA, 29 nt, synthetic construct
  source 1..29: mol_type = other RNA
gtgttcattgccctgggccggtggctgga

SEQ ID NO: 13027 - RNA, 29 nt, synthetic construct
  source 1..29: mol_type = other RNA
gtgttcattgccctgggccggtggttgga

SEQ ID NO: 13028 - RNA, 29 nt, synthetic construct
  source 1..29: mol_type = other RNA
gtgttcattgccctgggccggtggttaga

SEQ ID NO: 13029 - RNA, 30 nt, synthetic construct
  source 1..30: mol_type = other RNA
tgtgttcattgccctgggccggtggctgga

SEQ ID NO: 13030 - RNA, 30 nt, synthetic construct
  source 1..30: mol_type = other RNA
tgtgttcattgccctgggccggtggttaga

SEQ ID NO: 13031 - RNA, 30 nt, synthetic construct
  source 1..30: mol_type = other RNA
tgtgttcattgccctgggccggtggttgga

SEQ ID NO: 13032 - RNA, 31 nt, synthetic construct
  source 1..31: mol_type = other RNA
ttgtgttcattgccctgggccggtggttgga

SEQ ID NO: 13033 - RNA, 31 nt, synthetic construct
  source 1..31: mol_type = other RNA
ttgtgttcattgccctgggccggtggctgga

SEQ ID NO: 13034 - RNA, 31 nt, synthetic construct
  source 1..31: mol_type = other RNA
ttgtgttcattgccctgggccggtggttaga

SEQ ID NO: 13035 - RNA, 32 nt, synthetic construct
  source 1..32: mol_type = other RNA
tttgtgttcattgccctgggccggtggttgga

SEQ ID NO: 13036 - RNA, 32 nt, synthetic construct
  source 1..32: mol_type = other RNA
tttgtgttcattgccctgggccggtggttaga

SEQ ID NO: 13037 - RNA, 32 nt, synthetic construct
  source 1..32: mol_type = other RNA
tttgtgttcattgccctgggccggtggctgga

SEQ ID NO: 13038 - RNA, 33 nt, synthetic construct
  source 1..33: mol_type = other RNA
ctttgtgttcattgccctgggccggtggttgga

SEQ ID NO: 13039 - RNA, 33 nt, synthetic construct
  source 1..33: mol_type = other RNA
ctttgtgttcattgccctgggccggtggttaga

SEQ ID NO: 13040 - RNA, 33 nt, synthetic construct
  source 1..33: mol_type = other RNA
ctttgtgttcattgccctgggccggtggctgga

SEQ ID NO: 13041 - RNA, 34 nt, synthetic construct
  source 1..34: mol_type = other RNA
tctttgtgttcattgccctgggccggtggctgga

SEQ ID NO: 13042 - RNA, 34 nt, synthetic construct
  source 1..34: mol_type = other RNA
tctttgtgttcattgccctgggccggtggttgga

SEQ ID NO: 13043 - RNA, 34 nt, synthetic construct
  source 1..34: mol_type = other RNA
tctttgtgttcattgccctgggccggtggttaga

SEQ ID NO: 13044 - RNA, 35 nt, synthetic construct
  source 1..35: mol_type = other RNA
ctctttgtgttcattgccctgggccggtggttgga

SEQ ID NO: 13045 - RNA, 35 nt, synthetic construct
  source 1..35: mol_type = other RNA
ctctttgtgttcattgccctgggccggtggctgga

SEQ ID NO: 13046 - RNA, 35 nt, synthetic construct
  source 1..35: mol_type = other RNA
ctctttgtgttcattgccctgggccggtggttaga

SEQ ID NO: 13047 - RNA, 36 nt, synthetic construct
  source 1..36: mol_type = other RNA
gctctttgtgttcattgccctgggccggtggctgga

SEQ ID NO: 13048 - RNA, 36 nt, synthetic construct
  source 1..36: mol_type = other RNA
gctctttgtgttcattgccctgggccggtggttaga

SEQ ID NO: 13049 - RNA, 36 nt, synthetic construct
  source 1..36: mol_type = other RNA
gctctttgtgttcattgccctgggccggtggttgga

SEQ ID NO: 13050 - RNA, 37 nt, synthetic construct
  source 1..37: mol_type = other RNA
tgctctttgtgttcattgccctgggccggtggttgga

SEQ ID NO: 13051 - RNA, 37 nt, synthetic construct
  source 1..37: mol_type = other RNA
tgctctttgtgttcattgccctgggccggtggttaga

SEQ ID NO: 13052 - RNA, 37 nt, synthetic construct
  source 1..37: mol_type = other RNA
tgctctttgtgttcattgccctgggccggtggctgga

SEQ ID NO: 13053 - RNA, 38 nt, synthetic construct
  source 1..38: mol_type = other RNA
atgctctttgtgttcattgccctgggccggtggctgga

SEQ ID NO: 13054 - RNA, 38 nt, synthetic construct
  source 1..38: mol_type = other RNA
atgctctttgtgttcattgccctgggccggtggttaga

SEQ ID NO: 13055 - RNA, 38 nt, synthetic construct
  source 1..38: mol_type = other RNA
atgctctttgtgttcattgccctgggccggtggttgga

SEQ ID NO: 13056 - RNA, 39 nt, synthetic construct
  source 1..39: mol_type = other RNA
catgctctttgtgttcattgccctgggccggtggctgga

SEQ ID NO: 13057 - RNA, 39 nt, synthetic construct
  source 1..39: mol_type = other RNA
catgctctttgtgttcattgccctgggccggtggttaga

SEQ ID NO: 13058 - RNA, 39 nt, synthetic construct
  source 1..39: mol_type = other RNA
catgctctttgtgttcattgccctgggccggtggttgga

SEQ ID NO: 13059 - RNA, 40 nt, synthetic construct
  source 1..40: mol_type = other RNA
ccatgctctttgtgttcattgccctgggccggtggttaga

SEQ ID NO: 13060 - RNA, 40 nt, synthetic construct
  source 1..40: mol_type = other RNA
ccatgctctttgtgttcattgccctgggccggtggctgga

SEQ ID NO: 13061 - RNA, 40 nt, synthetic construct
  source 1..40: mol_type = other RNA
ccatgctctttgtgttcattgccctgggccggtggttgga

SEQ ID NO: 13062 - RNA, 41 nt, synthetic construct
  source 1..41: mol_type = other RNA
cccatgctctttgtgttcattgccctgggccggtggttgga

SEQ ID NO: 13063 - RNA, 41 nt, synthetic construct
  source 1..41: mol_type = other RNA
cccatgctctttgtgttcattgccctgggccggtggctgga

SEQ ID NO: 13064 - RNA, 41 nt, synthetic construct
  source 1..41: mol_type = other RNA
cccatgctctttgtgttcattgccctgggccggtggttaga

SEQ ID NO: 13065 - RNA, 42 nt, synthetic construct
  source 1..42: mol_type = other RNA
ccccatgctctttgtgttcattgccctgggccggtggttaga

SEQ ID NO: 13066 - RNA, 42 nt, synthetic construct
  source 1..42: mol_type = other RNA
ccccatgctctttgtgttcattgccctgggccggtggctgga

SEQ ID NO: 13067 - RNA, 42 nt, synthetic construct
  source 1..42: mol_type = other RNA
ccccatgctctttgtgttcattgccctgggccggtggttgga

SEQ ID NO: 13068 - RNA, 43 nt, synthetic construct
  source 1..43: mol_type = other RNA
cccccatgctctttgtgttcattgccctgggccggtggttaga

SEQ ID NO: 13069 - RNA, 43 nt, synthetic construct
  source 1..43: mol_type = other RNA
cccccatgctctttgtgttcattgccctgggccggtggctgga

SEQ ID NO: 13070 - RNA, 43 nt, synthetic construct
  source 1..43: mol_type = other RNA
cccccatgctctttgtgttcattgccctgggccggtggttgga

SEQ ID NO: 13071 - RNA, 44 nt, synthetic construct
  source 1..44: mol_type = other RNA
ccccccatgctctttgtgttcattgccctgggccggtggctgga

SEQ ID NO: 13072 - RNA, 44 nt, synthetic construct
  source 1..44: mol_type = other RNA
ccccccatgctctttgtgttcattgccctgggccggtggttaga

SEQ ID NO: 13073 - RNA, 44 nt, synthetic construct
  source 1..44: mol_type = other RNA
ccccccatgctctttgtgttcattgccctgggccggtggttgga

SEQ ID NO: 13074 - RNA, 45 nt, synthetic construct
  source 1..45: mol_type = other RNA
gccccccatgctctttgtgttcattgccctgggccggtggttaga

SEQ ID NO: 13075 - RNA, 45 nt, synthetic construct
  source 1..45: mol_type = other RNA
gccccccatgctctttgtgttcattgccctgggccggtggttgga

SEQ ID NO: 13076 - RNA, 45 nt, synthetic construct
  source 1..45: mol_type = other RNA
gccccccatgctctttgtgttcattgccctgggccggtggctgga

SEQ ID NO: 13077 - RNA, 46 nt, synthetic construct
  source 1..46: mol_type = other RNA
cgccccccatgctctttgtgttcattgccctgggccggtggctgga

SEQ ID NO: 13078 - RNA, 46 nt, synthetic construct
  source 1..46: mol_type = other RNA
cgccccccatgctctttgtgttcattgccctgggccggtggttaga

SEQ ID NO: 13079 - RNA, 46 nt, synthetic construct
  source 1..46: mol_type = other RNA
cgccccccatgctctttgtgttcattgccctgggccggtggttgga

SEQ ID NO: 13080 - RNA, 47 nt, synthetic construct
  source 1..47: mol_type = other RNA
acgccccccatgctctttgtgttcattgccctgggccggtggttgga

SEQ ID NO: 13081 - RNA, 47 nt, synthetic construct
  source 1..47: mol_type = other RNA
acgccccccatgctctttgtgttcattgccctgggccggtggctgga

SEQ ID NO: 13082 - RNA, 47 nt, synthetic construct
  source 1..47: mol_type = other RNA
acgccccccatgctctttgtgttcattgccctgggccggtggttaga

SEQ ID NO: 13083 - RNA, 48 nt, synthetic construct
  source 1..48: mol_type = other RNA
cacgccccccatgctctttgtgttcattgccctgggccggtggttaga

SEQ ID NO: 13084 - RNA, 48 nt, synthetic construct
  source 1..48: mol_type = other RNA
cacgccccccatgctctttgtgttcattgccctgggccggtggttgga

SEQ ID NO: 13085 - RNA, 48 nt, synthetic construct
  source 1..48: mol_type = other RNA
cacgccccccatgctctttgtgttcattgccctgggccggtggctgga

SEQ ID NO: 13086 - RNA, 49 nt, synthetic construct
  source 1..49: mol_type = other RNA
acacgccccccatgctctttgtgttcattgccctgggccggtggttaga

SEQ ID NO: 13087 - RNA, 49 nt, synthetic construct
  source 1..49: mol_type = other RNA
acacgccccccatgctctttgtgttcattgccctgggccggtggttgga

SEQ ID NO: 13088 - RNA, 49 nt, synthetic construct
  source 1..49: mol_type = other RNA
acacgccccccatgctctttgtgttcattgccctgggccggtggctgga

SEQ ID NO: 13089 - RNA, 50 nt, synthetic construct
  source 1..50: mol_type = other RNA
gacacgccccccatgctctttgtgttcattgccctgggccggtggttaga

SEQ ID NO: 13090 - RNA, 50 nt, synthetic construct
  source 1..50: mol_type = other RNA
gacacgccccccatgctctttgtgttcattgccctgggccggtggctgga

SEQ ID NO: 13091 - RNA, 50 nt, synthetic construct
  source 1..50: mol_type = other RNA
gacacgccccccatgctctttgtgttcattgccctgggccggtggttgga

SEQ ID NO: 13092 - RNA, 51 nt, synthetic construct
  source 1..51: mol_type = other RNA
cgacacgccccccatgctctttgtgttcattgccctgggccggtggttaga

SEQ ID NO: 13093 - RNA, 51 nt, synthetic construct
  source 1..51: mol_type = other RNA
cgacacgccccccatgctctttgtgttcattgccctgggccggtggctgga

SEQ ID NO: 13094 - RNA, 51 nt, synthetic construct
  source 1..51: mol_type = other RNA
cgacacgccccccatgctctttgtgttcattgccctgggccggtggttgga

SEQ ID NO: 13095 - RNA, 52 nt, synthetic construct
  source 1..52: mol_type = other RNA
tcgacacgccccccatgctctttgtgttcattgccctgggccggtggttgga

SEQ ID NO: 13096 - RNA, 52 nt, synthetic construct
  source 1..52: mol_type = other RNA
tcgacacgccccccatgctctttgtgttcattgccctgggccggtggttaga

SEQ ID NO: 13097 - RNA, 52 nt, synthetic construct
  source 1..52: mol_type = other RNA
tcgacacgccccccatgctctttgtgttcattgccctgggccggtggctgga

SEQ ID NO: 13098 - RNA, 53 nt, synthetic construct
  source 1..53: mol_type = other RNA
ttcgacacgccccccatgctctttgtgttcattgccctgggccggtggttgga

SEQ ID NO: 13099 - RNA, 53 nt, synthetic construct
  source 1..53: mol_type = other RNA
ttcgacacgccccccatgctctttgtgttcattgccctgggccggtggttaga

SEQ ID NO: 13100 - RNA, 53 nt, synthetic construct
  source 1..53: mol_type = other RNA
ttcgacacgccccccatgctctttgtgttcattgccctgggccggtggctgga

SEQ ID NO: 13101 - RNA, 54 nt, synthetic construct
  source 1..54: mol_type = other RNA
cttcgacacgccccccatgctctttgtgttcattgccctgggccggtggctgga

SEQ ID NO: 13102 - RNA, 54 nt, synthetic construct
  source 1..54: mol_type = other RNA
cttcgacacgccccccatgctctttgtgttcattgccctgggccggtggttgga

SEQ ID NO: 13103 - RNA, 54 nt, synthetic construct
  source 1..54: mol_type = other RNA
cttcgacacgccccccatgctctttgtgttcattgccctgggccggtggttaga

SEQ ID NO: 13104 - RNA, 55 nt, synthetic construct
  source 1..55: mol_type = other RNA
tcttcgacacgccccccatgctctttgtgttcattgccctgggccggtggttaga

SEQ ID NO: 13105 - RNA, 55 nt, synthetic construct
  source 1..55: mol_type = other RNA
tcttcgacacgccccccatgctctttgtgttcattgccctgggccggtggctgga

SEQ ID NO: 13106 - RNA, 55 nt, synthetic construct
  source 1..55: mol_type = other RNA
tcttcgacacgccccccatgctctttgtgttcattgccctgggccggtggttgga

SEQ ID NO: 13107 - RNA, 56 nt, synthetic construct
  source 1..56: mol_type = other RNA
ttcttcgacacgccccccatgctctttgtgttcattgccctgggccggtggttgga

SEQ ID NO: 13108 - RNA, 56 nt, synthetic construct
  source 1..56: mol_type = other RNA
ttcttcgacacgccccccatgctctttgtgttcattgccctgggccggtggttaga

SEQ ID NO: 13109 - RNA, 56 nt, synthetic construct
  source 1..56: mol_type = other RNA
ttcttcgacacgccccccatgctctttgtgttcattgccctgggccggtggctgga

SEQ ID NO: 13110 - RNA, 57 nt, synthetic construct
  source 1..57: mol_type = other RNA
attcttcgacacgccccccatgctctttgtgttcattgccctgggccggtggctgga

SEQ ID NO: 13111 - RNA, 57 nt, synthetic construct
  source 1..57: mol_type = other RNA
attcttcgacacgccccccatgctctttgtgttcattgccctgggccggtggttaga

SEQ ID NO: 13112 - RNA, 57 nt, synthetic construct
  source 1..57: mol_type = other RNA
attcttcgacacgccccccatgctctttgtgttcattgccctgggccggtggttgga

SEQ ID NO: 13113 - RNA, 58 nt, synthetic construct
  source 1..58: mol_type = other RNA
cattcttcgacacgccccccatgctctttgtgttcattgccctgggccggtggttaga

SEQ ID NO: 13114 - RNA, 58 nt, synthetic construct
  source 1..58: mol_type = other RNA
cattcttcgacacgccccccatgctctttgtgttcattgccctgggccggtggttgga

SEQ ID NO: 13115 - RNA, 58 nt, synthetic construct
  source 1..58: mol_type = other RNA
cattcttcgacacgccccccatgctctttgtgttcattgccctgggccggtggctgga

SEQ ID NO: 13116 - RNA, 59 nt, synthetic construct
  source 1..59: mol_type = other RNA
acattcttcgacacgccccccatgctctttgtgttcattgccctgggccggtggttgga

SEQ ID NO: 13117 - RNA, 59 nt, synthetic construct
  source 1..59: mol_type = other RNA
acattcttcgacacgccccccatgctctttgtgttcattgccctgggccggtggttaga

SEQ ID NO: 13118 - RNA, 59 nt, synthetic construct
  source 1..59: mol_type = other RNA
acattcttcgacacgccccccatgctctttgtgttcattgccctgggccggtggctgga

SEQ ID NO: 13119 - RNA, 60 nt, synthetic construct
  source 1..60: mol_type = other RNA
gacattcttcgacacgccccccatgctctttgtgttcattgccctgggccggtggttgga

SEQ ID NO: 13120 - RNA, 60 nt, synthetic construct
  source 1..60: mol_type = other RNA
gacattcttcgacacgccccccatgctctttgtgttcattgccctgggccggtggttaga

SEQ ID NO: 13121 - RNA, 60 nt, synthetic construct
  source 1..60: mol_type = other RNA
gacattcttcgacacgccccccatgctctttgtgttcattgccctgggccggtggctgga

SEQ ID NO: 13122 - RNA, 61 nt, synthetic construct
  source 1..61: mol_type = other RNA
tgacattcttcgacacgccccccatgctctttgtgttcattgccctgggccggtggctgga

SEQ ID NO: 13123 - RNA, 61 nt, synthetic construct
  source 1..61: mol_type = other RNA
tgacattcttcgacacgccccccatgctctttgtgttcattgccctgggccggtggttaga

SEQ ID NO: 13124 - RNA, 61 nt, synthetic construct
  source 1..61: mol_type = other RNA
tgacattcttcgacacgccccccatgctctttgtgttcattgccctgggccggtggttgga

SEQ ID NO: 13125 - RNA, 62 nt, synthetic construct
  source 1..62: mol_type = other RNA
gtgacattcttcgacacgccccccatgctctttgtgttcattgccctgggccggtggttgga

SEQ ID NO: 13126 - RNA, 62 nt, synthetic construct
  source 1..62: mol_type = other RNA
gtgacattcttcgacacgccccccatgctctttgtgttcattgccctgggccggtggctgga

SEQ ID NO: 13127 - RNA, 62 nt, synthetic construct
  source 1..62: mol_type = other RNA
gtgacattcttcgacacgccccccatgctctttgtgttcattgccctgggccggtggttaga

SEQ ID NO: 13128 - RNA, 63 nt, synthetic construct
  source 1..63: mol_type = other RNA
tgtgacattcttcgacacgccccccatgctctttgtgttcattgccctgggccggtggttaga

SEQ ID NO: 13129 - RNA, 63 nt, synthetic construct
  source 1..63: mol_type = other RNA
tgtgacattcttcgacacgccccccatgctctttgtgttcattgccctgggccggtggctgga

SEQ ID NO: 13130 - RNA, 63 nt, synthetic construct
  source 1..63: mol_type = other RNA
tgtgacattcttcgacacgccccccatgctctttgtgttcattgccctgggccggtggttgga

SEQ ID NO: 13131 - RNA, 64 nt, synthetic construct
  source 1..64: mol_type = other RNA
ctgtgacattcttcgacacgccccccatgctctttgtgttcattgccctgggccggtggctgga

SEQ ID NO: 13132 - RNA, 64 nt, synthetic construct
  source 1..64: mol_type = other RNA
ctgtgacattcttcgacacgccccccatgctctttgtgttcattgccctgggccggtggttaga

SEQ ID NO: 13133 - RNA, 64 nt, synthetic construct
  source 1..64: mol_type = other RNA
ctgtgacattcttcgacacgccccccatgctctttgtgttcattgccctgggccggtggttgga

SEQ ID NO: 13134 - RNA, 65 nt, synthetic construct
  source 1..65: mol_type = other RNA
cctgtgacattcttcgacacgccccccatgctctttgtgttcattgccctgggccggtggctgga

SEQ ID NO: 13135 - RNA, 65 nt, synthetic construct
  source 1..65: mol_type = other RNA
cctgtgacattcttcgacacgccccccatgctctttgtgttcattgccctgggccggtggttgga

SEQ ID NO: 13136 - RNA, 65 nt, synthetic construct
  source 1..65: mol_type = other RNA
cctgtgacattcttcgacacgccccccatgctctttgtgttcattgccctgggccggtggttaga

SEQ ID NO: 13137 - RNA, 66 nt, synthetic construct
  source 1..66: mol_type = other RNA
ccctgtgacattcttcgacacgccccccatgctctttgtgttcattgccctgggccggtggttaga

SEQ ID NO: 13138 - RNA, 66 nt, synthetic construct
  source 1..66: mol_type = other RNA
ccctgtgacattcttcgacacgccccccatgctctttgtgttcattgccctgggccggtggttgga

SEQ ID NO: 13139 - RNA, 66 nt, synthetic construct
  source 1..66: mol_type = other RNA
ccctgtgacattcttcgacacgccccccatgctctttgtgttcattgccctgggccggtggctgga

SEQ ID NO: 13140 - RNA, 67 nt, synthetic construct
  source 1..67: mol_type = other RNA
gccctgtgacattcttcgacacgccccccatgctctttgtgttcattgccctgggccggtggttgga

SEQ ID NO: 13141 - RNA, 67 nt, synthetic construct
  source 1..67: mol_type = other RNA
gccctgtgacattcttcgacacgccccccatgctctttgtgttcattgccctgggccggtggttaga

SEQ ID NO: 13142 - RNA, 67 nt, synthetic construct
  source 1..67: mol_type = other RNA
gccctgtgacattcttcgacacgccccccatgctctttgtgttcattgccctgggccggtggctgga

SEQ ID NO: 13143 - RNA, 68 nt, synthetic construct
  source 1..68: mol_type = other RNA
agccctgtgacattcttcgacacgccccccatgctctttgtgttcattgccctgggccggtggttaga

SEQ ID NO: 13144 - RNA, 68 nt, synthetic construct
  source 1..68: mol_type = other RNA
agccctgtgacattcttcgacacgccccccatgctctttgtgttcattgccctgggccggtggctgga

SEQ ID NO: 13145 - RNA, 68 nt, synthetic construct
  source 1..68: mol_type = other RNA
agccctgtgacattcttcgacacgccccccatgctctttgtgttcattgccctgggccggtggttgga

SEQ ID NO: 13146 - RNA, 69 nt, synthetic construct
  source 1..69: mol_type = other RNA
gagccctgtgacattcttcgacacgccccccatgctctttgtgttcattgccctgggccggtggttaga

SEQ ID NO: 13147 - RNA, 69 nt, synthetic construct
  source 1..69: mol_type = other RNA
gagccctgtgacattcttcgacacgccccccatgctctttgtgttcattgccctgggccggtggctgga

SEQ ID NO: 13148 - RNA, 69 nt, synthetic construct
  source 1..69: mol_type = other RNA
gagccctgtgacattcttcgacacgccccccatgctctttgtgttcattgccctgggccggtggttgga

SEQ ID NO: 13149 - RNA, 70 nt, synthetic construct
  source 1..70: mol_type = other RNA
ggagccctgtgacattcttcgacacgccccccatgctctttgtgttcattgccctgggccggtggttaga

SEQ ID NO: 13150 - RNA, 70 nt, synthetic construct
  source 1..70: mol_type = other RNA
ggagccctgtgacattcttcgacacgccccccatgctctttgtgttcattgccctgggccggtggctgga

SEQ ID NO: 13151 - RNA, 70 nt, synthetic construct
  source 1..70: mol_type = other RNA
ggagccctgtgacattcttcgacacgccccccatgctctttgtgttcattgccctgggccggtggttgga

SEQ ID NO: 13152 - RNA, 71 nt, synthetic construct
  source 1..71: mol_type = other RNA
aggagccctgtgacattcttcgacacgccccccatgctctttgtgttcattgccctgggccggtggttgga

SEQ ID NO: 13153 - RNA, 71 nt, synthetic construct
  source 1..71: mol_type = other RNA
aggagccctgtgacattcttcgacacgccccccatgctctttgtgttcattgccctgggccggtggctgga

SEQ ID NO: 13154 - RNA, 71 nt, synthetic construct
  source 1..71: mol_type = other RNA
aggagccctgtgacattcttcgacacgccccccatgctctttgtgttcattgccctgggccggtggttaga

SEQ ID NO: 13155 - RNA, 72 nt, synthetic construct
  source 1..72: mol_type = other RNA
gaggagccctgtgacattcttcgacacgccccccatgctctttgtgttcattgccctgggccggtggctgga

SEQ ID NO: 13156 - RNA, 72 nt, synthetic construct
  source 1..72: mol_type = other RNA
gaggagccctgtgacattcttcgacacgccccccatgctctttgtgttcattgccctgggccggtggttgga

SEQ ID NO: 13157 - RNA, 72 nt, synthetic construct
  source 1..72: mol_type = other RNA
gaggagccctgtgacattcttcgacacgccccccatgctctttgtgttcattgccctgggccggtggttaga

SEQ ID NO: 13158 - RNA, 73 nt, synthetic construct
  source 1..73: mol_type = other RNA
agaggagccctgtgacattcttcgacacgccccccatgctctttgtgttcattgccctgggccggtggctgga

SEQ ID NO: 13159 - RNA, 73 nt, synthetic construct
  source 1..73: mol_type = other RNA
agaggagccctgtgacattcttcgacacgccccccatgctctttgtgttcattgccctgggccggtggttaga

SEQ ID NO: 13160 - RNA, 73 nt, synthetic construct
  source 1..73: mol_type = other RNA
agaggagccctgtgacattcttcgacacgccccccatgctctttgtgttcattgccctgggccggtggttgga

SEQ ID NO: 13161 - RNA, 74 nt, synthetic construct
  source 1..74: mol_type = other RNA
gagaggagccctgtgacattcttcgacacgccccccatgctctttgtgttcattgccctgggccggtggctgga

SEQ ID NO: 13162 - RNA, 74 nt, synthetic construct
  source 1..74: mol_type = other RNA
gagaggagccctgtgacattcttcgacacgccccccatgctctttgtgttcattgccctgggccggtggttgga

SEQ ID NO: 13163 - RNA, 74 nt, synthetic construct
  source 1..74: mol_type = other RNA
gagaggagccctgtgacattcttcgacacgccccccatgctctttgtgttcattgccctgggccggtggttaga

SEQ ID NO: 13164 - RNA, 75 nt, synthetic construct
  source 1..75: mol_type = other RNA
ggagaggagccctgtgacattcttcgacacgccccccatgctctttgtgttcattgccctgggccggtggctgga

SEQ ID NO: 13165 - RNA, 75 nt, synthetic construct
  source 1..75: mol_type = other RNA
ggagaggagccctgtgacattcttcgacacgccccccatgctctttgtgttcattgccctgggccggtggttgga

SEQ ID NO: 13166 - RNA, 75 nt, synthetic construct
  source 1..75: mol_type = other RNA
ggagaggagccctgtgacattcttcgacacgccccccatgctctttgtgttcattgccctgggccggtggttaga

SEQ ID NO: 13167 - RNA, 76 nt, synthetic construct
  source 1..76: mol_type = other RNA
cggagaggagccctgtgacattcttcgacacgccccccatgctctttgtgttcattgccctgggccggtggctgga

SEQ ID NO: 13168 - RNA, 76 nt, synthetic construct
  source 1..76: mol_type = other RNA
cggagaggagccctgtgacattcttcgacacgccccccatgctctttgtgttcattgccctgggccggtggttaga

SEQ ID NO: 13169 - RNA, 76 nt, synthetic construct
  source 1..76: mol_type = other RNA
cggagaggagccctgtgacattcttcgacacgccccccatgctctttgtgttcattgccctgggccggtggttgga

SEQ ID NO: 13170 - RNA, 77 nt, synthetic construct
  source 1..77: mol_type = other RNA
gcggagaggagccctgtgacattcttcgacacgccccccatgctctttgtgttcattgccctgggccggtggctgga

SEQ ID NO: 13171 - RNA, 77 nt, synthetic construct
  source 1..77: mol_type = other RNA
gcggagaggagccctgtgacattcttcgacacgccccccatgctctttgtgttcattgccctgggccggtggttgga

SEQ ID NO: 13172 - RNA, 77 nt, synthetic construct
  source 1..77: mol_type = other RNA
gcggagaggagccctgtgacattcttcgacacgccccccatgctctttgtgttcattgccctgggccggtggttaga

SEQ ID NO: 13173 - RNA, 78 nt, synthetic construct
  source 1..78: mol_type = other RNA
ggcggagaggagccctgtgacattcttcgacacgccccccatgctctttgtgttcattgccctgggccggtggttgga

SEQ ID NO: 13174 - RNA, 78 nt, synthetic construct
  source 1..78: mol_type = other RNA
ggcggagaggagccctgtgacattcttcgacacgccccccatgctctttgtgttcattgccctgggccggtggttaga

SEQ ID NO: 13175 - RNA, 78 nt, synthetic construct
  source 1..78: mol_type = other RNA
ggcggagaggagccctgtgacattcttcgacacgccccccatgctctttgtgttcattgccctgggccggtggctgga

SEQ ID NO: 13176 - RNA, 79 nt, synthetic construct
  source 1..79: mol_type = other RNA
aggcggagaggagccctgtgacattcttcgacacgccccccatgctctttgtgttcattgccctgggccggtggttaga

SEQ ID NO: 13177 - RNA, 79 nt, synthetic construct
  source 1..79: mol_type = other RNA
aggcggagaggagccctgtgacattcttcgacacgccccccatgctctttgtgttcattgccctgggccggtggttgga

SEQ ID NO: 13178 - RNA, 79 nt, synthetic construct
  source 1..79: mol_type = other RNA
aggcggagaggagccctgtgacattcttcgacacgccccccatgctctttgtgttcattgccctgggccggtggctgga

SEQ ID NO: 13179 - RNA, 80 nt, synthetic construct
  source 1..80: mol_type = other RNA
aaggcggagaggagccctgtgacattcttcgacacgccccccatgctctttgtgttcattgccctgggccggtggttgga

SEQ ID NO: 13180 - RNA, 80 nt, synthetic construct
  source 1..80: mol_type = other RNA
aaggcggagaggagccctgtgacattcttcgacacgccccccatgctctttgtgttcattgccctgggccggtggctgga

SEQ ID NO: 13181 - RNA, 80 nt, synthetic construct
  source 1..80: mol_type = other RNA
aaggcggagaggagccctgtgacattcttcgacacgccccccatgctctttgtgttcattgccctgggccggtggttaga

SEQ ID NO: 13182 - RNA, 81 nt, synthetic construct
  source 1..81: mol_type = other RNA
gaaggcggagaggagccctgtgacattcttcgacacgccccccatgctctttgtgttcattgccctgggccggtggttgga

SEQ ID NO: 13183 - RNA, 81 nt, synthetic construct
  source 1..81: mol_type = other RNA
gaaggcggagaggagccctgtgacattcttcgacacgccccccatgctctttgtgttcattgccctgggccggtggttaga

SEQ ID NO: 13184 - RNA, 81 nt, synthetic construct
  source 1..81: mol_type = other RNA
gaaggcggagaggagccctgtgacattcttcgacacgccccccatgctctttgtgttcattgccctgggccggtggctgga

SEQ ID NO: 13185 - RNA, 82 nt, synthetic construct
  source 1..82: mol_type = other RNA
agaaggcggagaggagccctgtgacattcttcgacacgccccccatgctctttgtgttcattgccctgggccggtggctgga

SEQ ID NO: 13186 - RNA, 82 nt, synthetic construct
  source 1..82: mol_type = other RNA
agaaggcggagaggagccctgtgacattcttcgacacgccccccatgctctttgtgttcattgccctgggccggtggttaga

SEQ ID NO: 13187 - RNA, 82 nt, synthetic construct
  source 1..82: mol_type = other RNA
agaaggcggagaggagccctgtgacattcttcgacacgccccccatgctctttgtgttcattgccctgggccggtggttgga

SEQ ID NO: 13188 - RNA, 83 nt, synthetic construct
  source 1..83: mol_type = other RNA
gagaaggcggagaggagccctgtgacattcttcgacacgccccccatgctctttgtgttcattgccctgggccggtggctgga

SEQ ID NO: 13189 - RNA, 83 nt, synthetic construct
  source 1..83: mol_type = other RNA
gagaaggcggagaggagccctgtgacattcttcgacacgccccccatgctctttgtgttcattgccctgggccggtggttaga

SEQ ID NO: 13190 - RNA, 83 nt, synthetic construct
  source 1..83: mol_type = other RNA
gagaaggcggagaggagccctgtgacattcttcgacacgccccccatgctctttgtgttcattgccctgggccggtggttgga

SEQ ID NO: 13191 - RNA, 84 nt, synthetic construct
  source 1..84: mol_type = other RNA
tgagaaggcggagaggagccctgtgacattcttcgacacgccccccatgctctttgtgttcattgccctgggccggtggttgga

SEQ ID NO: 13192 - RNA, 84 nt, synthetic construct
  source 1..84: mol_type = other RNA
tgagaaggcggagaggagccctgtgacattcttcgacacgccccccatgctctttgtgttcattgccctgggccggtggctgga

SEQ ID NO: 13193 - RNA, 84 nt, synthetic construct
  source 1..84: mol_type = other RNA
tgagaaggcggagaggagccctgtgacattcttcgacacgccccccatgctctttgtgttcattgccctgggccggtggttaga

SEQ ID NO: 13194 - RNA, 85 nt, synthetic construct
  source 1..85: mol_type = other RNA
ctgagaaggcggagaggagccctgtgacattcttcgacacgccccccatgctctttgtgttcattgccctgggccggtggctgga

SEQ ID NO: 13195 - RNA, 85 nt, synthetic construct
  source 1..85: mol_type = other RNA
ctgagaaggcggagaggagccctgtgacattcttcgacacgccccccatgctctttgtgttcattgccctgggccggtggttaga

SEQ ID NO: 13196 - RNA, 85 nt, synthetic construct
  source 1..85: mol_type = other RNA
ctgagaaggcggagaggagccctgtgacattcttcgacacgccccccatgctctttgtgttcattgccctgggccggtggttgga

SEQ ID NO: 13197 - RNA, 86 nt, synthetic construct
  source 1..86: mol_type = other RNA
gctgagaaggcggagaggagccctgtgacattcttcgacacgccccccatgctctttgtgttcattgccctgggccggtggttgga

SEQ ID NO: 13198 - RNA, 86 nt, synthetic construct
  source 1..86: mol_type = other RNA
gctgagaaggcggagaggagccctgtgacattcttcgacacgccccccatgctctttgtgttcattgccctgggccggtggctgga

SEQ ID NO: 13199 - RNA, 86 nt, synthetic construct
  source 1..86: mol_type = other RNA
gctgagaaggcggagaggagccctgtgacattcttcgacacgccccccatgctctttgtgttcattgccctgggccggtggttaga

SEQ ID NO: 13200 - RNA, 87 nt, synthetic construct
  source 1..87: mol_type = other RNA
ggctgagaaggcggagaggagccctgtgacattcttcgacacgccccccatgctctttgtgttcattgccctgggccggtggctgga

SEQ ID NO: 13201 - RNA, 87 nt, synthetic construct
  source 1..87: mol_type = other RNA
ggctgagaaggcggagaggagccctgtgacattcttcgacacgccccccatgctctttgtgttcattgccctgggccggtggttgga

SEQ ID NO: 13202 - RNA, 87 nt, synthetic construct
  source 1..87: mol_type = other RNA
ggctgagaaggcggagaggagccctgtgacattcttcgacacgccccccatgctctttgtgttcattgccctgggccggtggttaga

SEQ ID NO: 13203 - RNA, 88 nt, synthetic construct
  source 1..88: mol_type = other RNA
tggctgagaaggcggagaggagccctgtgacattcttcgacacgccccccatgctctttgtgttcattgccctgggccggtggttgga

SEQ ID NO: 13204 - RNA, 88 nt, synthetic construct
  source 1..88: mol_type = other RNA
tggctgagaaggcggagaggagccctgtgacattcttcgacacgccccccatgctctttgtgttcattgccctgggccggtggctgga

SEQ ID NO: 13205 - RNA, 88 nt, synthetic construct
  source 1..88: mol_type = other RNA
tggctgagaaggcggagaggagccctgtgacattcttcgacacgccccccatgctctttgtgttcattgccctgggccggtggttaga

SEQ ID NO: 13206 - RNA, 89 nt, synthetic construct
  source 1..89: mol_type = other RNA
gtggctgagaaggcggagaggagccctgtgacattcttcgacacgccccccatgctctttgtgttcattgccctgggccggtggttgga

SEQ ID NO: 13207 - RNA, 89 nt, synthetic construct
  source 1..89: mol_type = other RNA
gtggctgagaaggcggagaggagccctgtgacattcttcgacacgccccccatgctctttgtgttcattgccctgggccggtggctgga

SEQ ID NO: 13208 - RNA, 89 nt, synthetic construct
  source 1..89: mol_type = other RNA
gtggctgagaaggcggagaggagccctgtgacattcttcgacacgccccccatgctctttgtgttcattgccctgggccggtggttaga

SEQ ID NO: 13209 - RNA, 90 nt, synthetic construct
  source 1..90: mol_type = other RNA
tgtggctgagaaggcggagaggagccctgtgacattcttcgacacgccccccatgctctttgtgttcattgccctgggccggtggttgga

SEQ ID NO: 13210 - RNA, 90 nt, synthetic construct
  source 1..90: mol_type = other RNA
tgtggctgagaaggcggagaggagccctgtgacattcttcgacacgccccccatgctctttgtgttcattgccctgggccggtggctgga

SEQ ID NO: 13211 - RNA, 90 nt, synthetic construct
  source 1..90: mol_type = other RNA
tgtggctgagaaggcggagaggagccctgtgacattcttcgacacgccccccatgctctttgtgttcattgccctgggccggtggttaga

SEQ ID NO: 13212 - RNA, 91 nt, synthetic construct
  source 1..91: mol_type = other RNA
ctgtggctgagaaggcggagaggagccctgtgacattcttcgacacgccccccatgctctttgtgttcattgccctgggccggtggttgga

SEQ ID NO: 13213 - RNA, 91 nt, synthetic construct
  source 1..91: mol_type = other RNA
ctgtggctgagaaggcggagaggagccctgtgacattcttcgacacgccccccatgctctttgtgttcattgccctgggccggtggctgga

SEQ ID NO: 13214 - RNA, 91 nt, synthetic construct
  source 1..91: mol_type = other RNA
ctgtggctgagaaggcggagaggagccctgtgacattcttcgacacgccccccatgctctttgtgttcattgccctgggccggtggttaga

SEQ ID NO: 13215 - RNA, 92 nt, synthetic construct
  source 1..92: mol_type = other RNA
gctgtggctgagaaggcggagaggagccctgtgacattcttcgacacgccccccatgctctttgtgttcattgccctgggccggtggttgga

SEQ ID NO: 13216 - RNA, 92 nt, synthetic construct
  source 1..92: mol_type = other RNA
gctgtggctgagaaggcggagaggagccctgtgacattcttcgacacgccccccatgctctttgtgttcattgccctgggccggtggttaga

SEQ ID NO: 13217 - RNA, 92 nt, synthetic construct
  source 1..92: mol_type = other RNA
gctgtggctgagaaggcggagaggagccctgtgacattcttcgacacgccccccatgctctttgtgttcattgccctgggccggtggctgga

SEQ ID NO: 13218 - RNA, 93 nt, synthetic construct
  source 1..93: mol_type = other RNA
tgctgtggctgagaaggcggagaggagccctgtgacattcttcgacacgccccccatgctctttgtgttcattgccctgggccggtggctgga

SEQ ID NO: 13219 - RNA, 93 nt, synthetic construct
  source 1..93: mol_type = other RNA
tgctgtggctgagaaggcggagaggagccctgtgacattcttcgacacgccccccatgctctttgtgttcattgccctgggccggtggttaga

SEQ ID NO: 13220 - RNA, 93 nt, synthetic construct
  source 1..93: mol_type = other RNA
tgctgtggctgagaaggcggagaggagccctgtgacattcttcgacacgccccccatgctctttgtgttcattgccctgggccggtggttgga

SEQ ID NO: 13221 - RNA, 94 nt, synthetic construct
  source 1..94: mol_type = other RNA
ttgctgtggctgagaaggcggagaggagccctgtgacattcttcgacacgccccccatgctctttgtgttcattgccctgggccggtggctgga

SEQ ID NO: 13222 - RNA, 94 nt, synthetic construct
  source 1..94: mol_type = other RNA
ttgctgtggctgagaaggcggagaggagccctgtgacattcttcgacacgccccccatgctctttgtgttcattgccctgggccggtggttgga

SEQ ID NO: 13223 - RNA, 94 nt, synthetic construct
  source 1..94: mol_type = other RNA
ttgctgtggctgagaaggcggagaggagccctgtgacattcttcgacacgccccccatgctctttgtgttcattgccctgggccggtggttaga

SEQ ID NO: 13224 - RNA, 95 nt, synthetic construct
  source 1..95: mol_type = other RNA
gttgctgtggctgagaaggcggagaggagccctgtgacattcttcgacacgccccccatgctctttgtgttcattgccctgggccggtggttgga

SEQ ID NO: 13225 - RNA, 95 nt, synthetic construct
  source 1..95: mol_type = other RNA
gttgctgtggctgagaaggcggagaggagccctgtgacattcttcgacacgccccccatgctctttgtgttcattgccctgggccggtggctgga

SEQ ID NO: 13226 - RNA, 95 nt, synthetic construct
  source 1..95: mol_type = other RNA
gttgctgtggctgagaaggcggagaggagccctgtgacattcttcgacacgccccccatgctctttgtgttcattgccctgggccggtggttaga

SEQ ID NO: 13227 - RNA, 96 nt, synthetic construct
  source 1..96: mol_type = other RNA
ggttgctgtggctgagaaggcggagaggagccctgtgacattcttcgacacgccccccatgctctttgtgttcattgccctgggccggtggttgga

SEQ ID NO: 13228 - RNA, 96 nt, synthetic construct
  source 1..96: mol_type = other RNA
ggttgctgtggctgagaaggcggagaggagccctgtgacattcttcgacacgccccccatgctctttgtgttcattgccctgggccggtggttaga

SEQ ID NO: 13229 - RNA, 96 nt, synthetic construct
  source 1..96: mol_type = other RNA
ggttgctgtggctgagaaggcggagaggagccctgtgacattcttcgacacgccccccatgctctttgtgttcattgccctgggccggtggctgga

SEQ ID NO: 13230 - RNA, 97 nt, synthetic construct
  source 1..97: mol_type = other RNA
tggttgctgtggctgagaaggcggagaggagccctgtgacattcttcgacacgccccccatgctctttgtgttcattgccctgggccggtggttgga

SEQ ID NO: 13231 - RNA, 97 nt, synthetic construct
  source 1..97: mol_type = other RNA
tggttgctgtggctgagaaggcggagaggagccctgtgacattcttcgacacgccccccatgctctttgtgttcattgccctgggccggtggctgga

SEQ ID NO: 13232 - RNA, 97 nt, synthetic construct
  source 1..97: mol_type = other RNA
tggttgctgtggctgagaaggcggagaggagccctgtgacattcttcgacacgccccccatgctctttgtgttcattgccctgggccggtggttaga

SEQ ID NO: 13233 - RNA, 98 nt, synthetic construct
  source 1..98: mol_type = other RNA
gtggttgctgtggctgagaaggcggagaggagccctgtgacattcttcgacacgccccccatgctctttgtgttcattgccctgggccggtggctgga

SEQ ID NO: 13234 - RNA, 98 nt, synthetic construct
  source 1..98: mol_type = other RNA
gtggttgctgtggctgagaaggcggagaggagccctgtgacattcttcgacacgccccccatgctctttgtgttcattgccctgggccggtggttgga

SEQ ID NO: 13235 - RNA, 98 nt, synthetic construct
  source 1..98: mol_type = other RNA
gtggttgctgtggctgagaaggcggagaggagccctgtgacattcttcgacacgccccccatgctctttgtgttcattgccctgggccggtggttaga

SEQ ID NO: 13236 - RNA, 99 nt, synthetic construct
  source 1..99: mol_type = other RNA
ggtggttgctgtggctgagaaggcggagaggagccctgtgacattcttcgacacgccccccatgctctttgtgttcattgccctgggccggtggttaga

SEQ ID NO: 13237 - RNA, 99 nt, synthetic construct
  source 1..99: mol_type = other RNA
ggtggttgctgtggctgagaaggcggagaggagccctgtgacattcttcgacacgccccccatgctctttgtgttcattgccctgggccggtggctgga

SEQ ID NO: 13238 - RNA, 99 nt, synthetic construct
  source 1..99: mol_type = other RNA
ggtggttgctgtggctgagaaggcggagaggagccctgtgacattcttcgacacgccccccatgctctttgtgttcattgccctgggccggtggttgga

SEQ ID NO: 13239 - RNA, 100 nt, synthetic construct
  source 1..100: mol_type = other RNA
tggtggttgctgtggctgagaaggcggagaggagccctgtgacattcttcgacacgccccccatgctctttgtgttcattgccctgggccggtggttaga

SEQ ID NO: 13240 - RNA, 100 nt, synthetic construct
  source 1..100: mol_type = other RNA
tggtggttgctgtggctgagaaggcggagaggagccctgtgacattcttcgacacgccccccatgctctttgtgttcattgccctgggccggtggctgga

SEQ ID NO: 13241 - RNA, 100 nt, synthetic construct
  source 1..100: mol_type = other RNA
tggtggttgctgtggctgagaaggcggagaggagccctgtgacattcttcgacacgccccccatgctctttgtgttcattgccctgggccggtggttgga

SEQ ID NO: 13242 - RNA, 20 nt, synthetic construct
  source 1..20: mol_type = other RNA
cattgccctgggccggtggt

SEQ ID NO: 13243 - RNA, 20 nt, synthetic construct
  source 1..20: mol_type = other RNA
attgccctgggccggtggtt

SEQ ID NO: 13244 - RNA, 16 nt, synthetic construct
  source 1..16: mol_type = other RNA
aagtgttccagccaca

SEQ ID NO: 13245 - RNA, 17 nt, synthetic construct
  source 1..17: mol_type = other RNA
caagtgttccagccaca

SEQ ID NO: 13246 - RNA, 18 nt, synthetic construct
  source 1..18: mol_type = other RNA
ccaagtgttccagccaca

SEQ ID NO: 13247 - RNA, 19 nt, synthetic construct
  source 1..19: mol_type = other RNA
gccaagtgttccagccaca

SEQ ID NO: 13248 - RNA, 20 nt, synthetic construct
  source 1..20: mol_type = other RNA
tgccaagtgttccagccaca

SEQ ID NO: 13249 - RNA, 21 nt, synthetic construct
  source 1..21: mol_type = other RNA
ttgccaagtgttccagccaca

SEQ ID NO: 13250 - RNA, 22 nt, synthetic construct
  source 1..22: mol_type = other RNA
tttgccaagtgttccagccaca

SEQ ID NO: 13251-13255 - skipped (5 entries)

SEQ ID NO: 13256 - RNA, 10 nt, synthetic construct
  source 1..10: mol_type = other RNA
ggctggaaca

SEQ ID NO: 13257 - RNA, 11 nt, synthetic construct
  source 1..11: mol_type = other RNA
ggctggaacac

SEQ ID NO: 13258 - RNA, 12 nt, synthetic construct
  source 1..12: mol_type = other RNA
ggctggaacact

SEQ ID NO: 13259 - RNA, 13 nt, synthetic construct
  source 1..13: mol_type = other RNA
ggctggaacactt

SEQ ID NO: 13260 - RNA, 14 nt, synthetic construct
  source 1..14: mol_type = other RNA
ggctggaacacttg

SEQ ID NO: 13261 - RNA, 15 nt, synthetic construct
  source 1..15: mol_type = other RNA
ggctggaacacttgg

SEQ ID NO: 13262 - RNA, 16 nt, synthetic construct
  source 1..16: mol_type = other RNA
ggctggaacacttggc

SEQ ID NO: 13263 - RNA, 17 nt, synthetic construct
  source 1..17: mol_type = other RNA
ggctggaacacttggca

SEQ ID NO: 13264 - RNA, 18 nt, synthetic construct
  source 1..18: mol_type = other RNA
ggctggaacacttggcaa

SEQ ID NO: 13265 - RNA, 19 nt, synthetic construct
  source 1..19: mol_type = other RNA
ggctggaacacttggcaaa

SEQ ID NO: 13266 - RNA, 10 nt, synthetic construct
  source 1..10: mol_type = other RNA
ctgggtcggt

SEQ ID NO: 13267 - RNA, 10 nt, synthetic construct
  source 1..10: mol_type = other RNA
ctgggacggt

SEQ ID NO: 13268 - RNA, 10 nt, synthetic construct
  source 1..10: mol_type = other RNA
ctgggccggt

SEQ ID NO: 13269 - RNA, 10 nt, synthetic construct
  source 1..10: mol_type = other RNA
ctggggcggt

SEQ ID NO: 13270 - RNA, 11 nt, synthetic construct
  source 1..11: mol_type = other RNA
cctggggcggt

SEQ ID NO: 13271 - RNA, 11 nt, synthetic construct
  source 1..11: mol_type = other RNA
cctgggacggt

SEQ ID NO: 13272 - RNA, 11 nt, synthetic construct
  source 1..11: mol_type = other RNA
cctgggccggt

SEQ ID NO: 13273 - RNA, 11 nt, synthetic construct
  source 1..11: mol_type = other RNA
cctgggtcggt

SEQ ID NO: 13274 - RNA, 12 nt, synthetic construct
  source 1..12: mol_type = other RNA
ccctgggacggt

SEQ ID NO: 13275 - RNA, 12 nt, synthetic construct
  source 1..12: mol_type = other RNA
ccctgggccggt

SEQ ID NO: 13276 - RNA, 12 nt, synthetic construct
  source 1..12: mol_type = other RNA
ccctgggtcggt

SEQ ID NO: 13277 - RNA, 12 nt, synthetic construct
  source 1..12: mol_type = other RNA
ccctggggcggt

SEQ ID NO: 13278 - RNA, 13 nt, synthetic construct
  source 1..13: mol_type = other RNA
gccctgggacggt

SEQ ID NO: 13279 - RNA, 13 nt, synthetic construct
  source 1..13: mol_type = other RNA
gccctgggtcggt

SEQ ID NO: 13280 - RNA, 13 nt, synthetic construct
  source 1..13: mol_type = other RNA
gccctggggcggt

SEQ ID NO: 13281 - RNA, 13 nt, synthetic construct
  source 1..13: mol_type = other RNA
gccctgggccggt

SEQ ID NO: 13282 - RNA, 14 nt, synthetic construct
  source 1..14: mol_type = other RNA
tgccctgggtcggt

SEQ ID NO: 13283 - RNA, 14 nt, synthetic construct
  source 1..14: mol_type = other RNA
tgccctggggcggt

SEQ ID NO: 13284 - RNA, 14 nt, synthetic construct
  source 1..14: mol_type = other RNA
tgccctgggccggt

SEQ ID NO: 13285 - RNA, 14 nt, synthetic construct
  source 1..14: mol_type = other RNA
tgccctgggacggt

SEQ ID NO: 13286 - RNA, 15 nt, synthetic construct
  source 1..15: mol_type = other RNA
ttgccctggggcggt

SEQ ID NO: 13287 - RNA, 15 nt, synthetic construct
  source 1..15: mol_type = other RNA
ttgccctgggtcggt

SEQ ID NO: 13288 - RNA, 15 nt, synthetic construct
  source 1..15: mol_type = other RNA
ttgccctgggacggt

SEQ ID NO: 13289 - RNA, 15 nt, synthetic construct
  source 1..15: mol_type = other RNA
ttgccctgggccggt

SEQ ID NO: 13290 - RNA, 16 nt, synthetic construct
  source 1..16: mol_type = other RNA
attgccctgggtcggt

SEQ ID NO: 13291 - RNA, 16 nt, synthetic construct
  source 1..16: mol_type = other RNA
attgccctggggcggt

SEQ ID NO: 13292 - RNA, 16 nt, synthetic construct
  source 1..16: mol_type = other RNA
attgccctgggccggt

SEQ ID NO: 13293 - RNA, 16 nt, synthetic construct
  source 1..16: mol_type = other RNA
attgccctgggacggt

SEQ ID NO: 13294 - RNA, 17 nt, synthetic construct
  source 1..17: mol_type = other RNA
cattgccctgggccggt

SEQ ID NO: 13295 - RNA, 17 nt, synthetic construct
  source 1..17: mol_type = other RNA
cattgccctgggtcggt

SEQ ID NO: 13296 - RNA, 17 nt, synthetic construct
  source 1..17: mol_type = other RNA
cattgccctgggacggt

SEQ ID NO: 13297 - RNA, 17 nt, synthetic construct
  source 1..17: mol_type = other RNA
cattgccctggggcggt

SEQ ID NO: 13298 - RNA, 18 nt, synthetic construct
  source 1..18: mol_type = other RNA
tcattgccctgggacggt

SEQ ID NO: 13299 - RNA, 18 nt, synthetic construct
  source 1..18: mol_type = other RNA
tcattgccctggggcggt

SEQ ID NO: 13300 - RNA, 18 nt, synthetic construct
  source 1..18: mol_type = other RNA
tcattgccctgggtcggt

SEQ ID NO: 13301 - RNA, 18 nt, synthetic construct
  source 1..18: mol_type = other RNA
tcattgccctgggccggt

SEQ ID NO: 13302 - RNA, 19 nt, synthetic construct
  source 1..19: mol_type = other RNA
ttcattgccctgggacggt

SEQ ID NO: 13303 - RNA, 19 nt, synthetic construct
  source 1..19: mol_type = other RNA
ttcattgccctgggccggt

SEQ ID NO: 13304 - RNA, 19 nt, synthetic construct
  source 1..19: mol_type = other RNA
ttcattgccctggggcggt

SEQ ID NO: 13305 - RNA, 19 nt, synthetic construct
  source 1..19: mol_type = other RNA
ttcattgccctgggtcggt

SEQ ID NO: 13306 - RNA, 20 nt, synthetic construct
  source 1..20: mol_type = other RNA
gttcattgccctgggacggt

SEQ ID NO: 13307 - RNA, 20 nt, synthetic construct
  source 1..20: mol_type = other RNA
gttcattgccctgggtcggt

SEQ ID NO: 13308 - RNA, 20 nt, synthetic construct
  source 1..20: mol_type = other RNA
gttcattgccctgggccggt

SEQ ID NO: 13309 - RNA, 20 nt, synthetic construct
  source 1..20: mol_type = other RNA
gttcattgccctggggcggt

SEQ ID NO: 13310 - RNA, 21 nt, synthetic construct
  source 1..21: mol_type = other RNA
tgttcattgccctgggtcggt

SEQ ID NO: 13311 - RNA, 21 nt, synthetic construct
  source 1..21: mol_type = other RNA
tgttcattgccctgggccggt

SEQ ID NO: 13312 - RNA, 21 nt, synthetic construct
  source 1..21: mol_type = other RNA
tgttcattgccctggggcggt

SEQ ID NO: 13313 - RNA, 21 nt, synthetic construct
  source 1..21: mol_type = other RNA
tgttcattgccctgggacggt

SEQ ID NO: 13314 - RNA, 22 nt, synthetic construct
  source 1..22: mol_type = other RNA
gtgttcattgccctgggacggt

SEQ ID NO: 13315 - RNA, 22 nt, synthetic construct
  source 1..22: mol_type = other RNA
gtgttcattgccctgggccggt

SEQ ID NO: 13316 - RNA, 22 nt, synthetic construct
  source 1..22: mol_type = other RNA
gtgttcattgccctggggcggt

SEQ ID NO: 13317 - RNA, 22 nt, synthetic construct
  source 1..22: mol_type = other RNA
gtgttcattgccctgggtcggt

SEQ ID NO: 13318 - RNA, 23 nt, synthetic construct
  source 1..23: mol_type = other RNA
tgtgttcattgccctgggacggt

SEQ ID NO: 13319 - RNA, 23 nt, synthetic construct
  source 1..23: mol_type = other RNA
tgtgttcattgccctgggtcggt

SEQ ID NO: 13320 - RNA, 23 nt, synthetic construct
  source 1..23: mol_type = other RNA
tgtgttcattgccctggggcggt

SEQ ID NO: 13321 - RNA, 23 nt, synthetic construct
  source 1..23: mol_type = other RNA
tgtgttcattgccctgggccggt

SEQ ID NO: 13322 - RNA, 24 nt, synthetic construct
  source 1..24: mol_type = other RNA
ttgtgttcattgccctgggccggt

SEQ ID NO: 13323 - RNA, 24 nt, synthetic construct
  source 1..24: mol_type = other RNA
ttgtgttcattgccctgggacggt

SEQ ID NO: 13324 - RNA, 24 nt, synthetic construct
  source 1..24: mol_type = other RNA
ttgtgttcattgccctggggcggt

SEQ ID NO: 13325 - RNA, 24 nt, synthetic construct
  source 1..24: mol_type = other RNA
ttgtgttcattgccctgggtcggt

SEQ ID NO: 13326 - RNA, 25 nt, synthetic construct
  source 1..25: mol_type = other RNA
tttgtgttcattgccctgggacggt

SEQ ID NO: 13327 - RNA, 25 nt, synthetic construct
  source 1..25: mol_type = other RNA
tttgtgttcattgccctggggcggt

SEQ ID NO: 13328 - RNA, 25 nt, synthetic construct
  source 1..25: mol_type = other RNA
tttgtgttcattgccctgggccggt

SEQ ID NO: 13329 - RNA, 25 nt, synthetic construct
  source 1..25: mol_type = other RNA
tttgtgttcattgccctgggtcggt

SEQ ID NO: 13330 - RNA, 26 nt, synthetic construct
  source 1..26: mol_type = other RNA
ctttgtgttcattgccctgggacggt

SEQ ID NO: 13331 - RNA, 26 nt, synthetic construct
  source 1..26: mol_type = other RNA
ctttgtgttcattgccctggggcggt

SEQ ID NO: 13332 - RNA, 26 nt, synthetic construct
  source 1..26: mol_type = other RNA
ctttgtgttcattgccctgggtcggt

SEQ ID NO: 13333 - RNA, 26 nt, synthetic construct
  source 1..26: mol_type = other RNA
ctttgtgttcattgccctgggccggt

SEQ ID NO: 13334 - RNA, 27 nt, synthetic construct
  source 1..27: mol_type = other RNA
tctttgtgttcattgccctggggcggt

SEQ ID NO: 13335 - RNA, 27 nt, synthetic construct
  source 1..27: mol_type = other RNA
tctttgtgttcattgccctgggacggt

SEQ ID NO: 13336 - RNA, 27 nt, synthetic construct
  source 1..27: mol_type = other RNA
tctttgtgttcattgccctgggccggt

SEQ ID NO: 13337 - RNA, 27 nt, synthetic construct
  source 1..27: mol_type = other RNA
tctttgtgttcattgccctgggtcggt

SEQ ID NO: 13338 - RNA, 28 nt, synthetic construct
  source 1..28: mol_type = other RNA
ctctttgtgttcattgccctgggccggt

SEQ ID NO: 13339 - RNA, 28 nt, synthetic construct
  source 1..28: mol_type = other RNA
ctctttgtgttcattgccctgggtcggt

SEQ ID NO: 13340 - RNA, 28 nt, synthetic construct
  source 1..28: mol_type = other RNA
ctctttgtgttcattgccctgggacggt

SEQ ID NO: 13341 - RNA, 28 nt, synthetic construct
  source 1..28: mol_type = other RNA
ctctttgtgttcattgccctggggcggt

SEQ ID NO: 13342 - RNA, 29 nt, synthetic construct
  source 1..29: mol_type = other RNA
gctctttgtgttcattgccctgggtcggt

SEQ ID NO: 13343 - RNA, 29 nt, synthetic construct
  source 1..29: mol_type = other RNA
gctctttgtgttcattgccctggggcggt

SEQ ID NO: 13344 - RNA, 29 nt, synthetic construct
  source 1..29: mol_type = other RNA
gctctttgtgttcattgccctgggacggt

SEQ ID NO: 13345 - RNA, 29 nt, synthetic construct
  source 1..29: mol_type = other RNA
gctctttgtgttcattgccctgggccggt

SEQ ID NO: 13346 - RNA, 30 nt, synthetic construct
  source 1..30: mol_type = other RNA
tgctctttgtgttcattgccctgggccggt

SEQ ID NO: 13347 - RNA, 30 nt, synthetic construct
  source 1..30: mol_type = other RNA
tgctctttgtgttcattgccctgggtcggt

SEQ ID NO: 13348 - RNA, 30 nt, synthetic construct
  source 1..30: mol_type = other RNA
tgctctttgtgttcattgccctgggacggt

SEQ ID NO: 13349 - RNA, 30 nt, synthetic construct
  source 1..30: mol_type = other RNA
tgctctttgtgttcattgccctggggcggt

SEQ ID NO: 13350 - RNA, 31 nt, synthetic construct
  source 1..31: mol_type = other RNA
atgctctttgtgttcattgccctgggacggt

SEQ ID NO: 13351 - RNA, 31 nt, synthetic construct
  source 1..31: mol_type = other RNA
atgctctttgtgttcattgccctggggcggt

SEQ ID NO: 13352 - RNA, 31 nt, synthetic construct
  source 1..31: mol_type = other RNA
atgctctttgtgttcattgccctgggtcggt

SEQ ID NO: 13353 - RNA, 31 nt, synthetic construct
  source 1..31: mol_type = other RNA
atgctctttgtgttcattgccctgggccggt

SEQ ID NO: 13354 - RNA, 32 nt, synthetic construct
  source 1..32: mol_type = other RNA
catgctctttgtgttcattgccctgggccggt

SEQ ID NO: 13355 - RNA, 32 nt, synthetic construct
  source 1..32: mol_type = other RNA
catgctctttgtgttcattgccctgggtcggt

SEQ ID NO: 13356 - RNA, 32 nt, synthetic construct
  source 1..32: mol_type = other RNA
catgctctttgtgttcattgccctgggacggt

SEQ ID NO: 13357 - RNA, 32 nt, synthetic construct
  source 1..32: mol_type = other RNA
catgctctttgtgttcattgccctggggcggt

SEQ ID NO: 13358 - RNA, 33 nt, synthetic construct
  source 1..33: mol_type = other RNA
ccatgctctttgtgttcattgccctgggtcggt

SEQ ID NO: 13359 - RNA, 33 nt, synthetic construct
  source 1..33: mol_type = other RNA
ccatgctctttgtgttcattgccctgggacggt

SEQ ID NO: 13360 - RNA, 33 nt, synthetic construct
  source 1..33: mol_type = other RNA
ccatgctctttgtgttcattgccctgggccggt

SEQ ID NO: 13361 - RNA, 33 nt, synthetic construct
  source 1..33: mol_type = other RNA
ccatgctctttgtgttcattgccctggggcggt

SEQ ID NO: 13362 - RNA, 34 nt, synthetic construct
  source 1..34: mol_type = other RNA
cccatgctctttgtgttcattgccctgggacggt

SEQ ID NO: 13363 - RNA, 34 nt, synthetic construct
  source 1..34: mol_type = other RNA
cccatgctctttgtgttcattgccctgggtcggt

SEQ ID NO: 13364 - RNA, 34 nt, synthetic construct
  source 1..34: mol_type = other RNA
cccatgctctttgtgttcattgccctgggccggt

SEQ ID NO: 13365 - RNA, 34 nt, synthetic construct
  source 1..34: mol_type = other RNA
cccatgctctttgtgttcattgccctggggcggt

SEQ ID NO: 13366 - RNA, 35 nt, synthetic construct
  source 1..35: mol_type = other RNA
ccccatgctctttgtgttcattgccctggggcggt

SEQ ID NO: 13367 - RNA, 35 nt, synthetic construct
  source 1..35: mol_type = other RNA
ccccatgctctttgtgttcattgccctgggacggt

SEQ ID NO: 13368 - RNA, 35 nt, synthetic construct
  source 1..35: mol_type = other RNA
ccccatgctctttgtgttcattgccctgggccggt

SEQ ID NO: 13369 - RNA, 35 nt, synthetic construct
  source 1..35: mol_type = other RNA
ccccatgctctttgtgttcattgccctgggtcggt

SEQ ID NO: 13370 - RNA, 36 nt, synthetic construct
  source 1..36: mol_type = other RNA
cccccatgctctttgtgttcattgccctgggccggt

SEQ ID NO: 13371 - RNA, 36 nt, synthetic construct
  source 1..36: mol_type = other RNA
cccccatgctctttgtgttcattgccctgggacggt

SEQ ID NO: 13372 - RNA, 36 nt, synthetic construct
  source 1..36: mol_type = other RNA
cccccatgctctttgtgttcattgccctggggcggt

SEQ ID NO: 13373 - RNA, 36 nt, synthetic construct
  source 1..36: mol_type = other RNA
cccccatgctctttgtgttcattgccctgggtcggt

SEQ ID NO: 13374 - RNA, 37 nt, synthetic construct
  source 1..37: mol_type = other RNA
ccccccatgctctttgtgttcattgccctgggacggt

SEQ ID NO: 13375 - RNA, 37 nt, synthetic construct
  source 1..37: mol_type = other RNA
ccccccatgctctttgtgttcattgccctggggcggt

SEQ ID NO: 13376 - RNA, 37 nt, synthetic construct
  source 1..37: mol_type = other RNA
ccccccatgctctttgtgttcattgccctgggccggt

SEQ ID NO: 13377 - RNA, 37 nt, synthetic construct
  source 1..37: mol_type = other RNA
ccccccatgctctttgtgttcattgccctgggtcggt

SEQ ID NO: 13378 - RNA, 38 nt, synthetic construct
  source 1..38: mol_type = other RNA
gccccccatgctctttgtgttcattgccctgggtcggt

SEQ ID NO: 13379 - RNA, 38 nt, synthetic construct
  source 1..38: mol_type = other RNA
gccccccatgctctttgtgttcattgccctggggcggt

SEQ ID NO: 13380 - RNA, 38 nt, synthetic construct
  source 1..38: mol_type = other RNA
gccccccatgctctttgtgttcattgccctgggccggt

SEQ ID NO: 13381 - RNA, 38 nt, synthetic construct
  source 1..38: mol_type = other RNA
gccccccatgctctttgtgttcattgccctgggacggt

SEQ ID NO: 13382 - RNA, 39 nt, synthetic construct
  source 1..39: mol_type = other RNA
cgccccccatgctctttgtgttcattgccctgggccggt

SEQ ID NO: 13383 - RNA, 39 nt, synthetic construct
  source 1..39: mol_type = other RNA
cgccccccatgctctttgtgttcattgccctggggcggt

SEQ ID NO: 13384 - RNA, 39 nt, synthetic construct
  source 1..39: mol_type = other RNA
cgccccccatgctctttgtgttcattgccctgggtcggt

SEQ ID NO: 13385 - RNA, 39 nt, synthetic construct
  source 1..39: mol_type = other RNA
cgccccccatgctctttgtgttcattgccctgggacggt

SEQ ID NO: 13386 - RNA, 40 nt, synthetic construct
  source 1..40: mol_type = other RNA
acgccccccatgctctttgtgttcattgccctgggtcggt

SEQ ID NO: 13387 - RNA, 40 nt, synthetic construct
  source 1..40: mol_type = other RNA
acgccccccatgctctttgtgttcattgccctgggccggt

SEQ ID NO: 13388 - RNA, 40 nt, synthetic construct
  source 1..40: mol_type = other RNA
acgccccccatgctctttgtgttcattgccctgggacggt

SEQ ID NO: 13389 - RNA, 40 nt, synthetic construct
  source 1..40: mol_type = other RNA
acgccccccatgctctttgtgttcattgccctggggcggt

SEQ ID NO: 13390 - RNA, 41 nt, synthetic construct
  source 1..41: mol_type = other RNA
cacgccccccatgctctttgtgttcattgccctgggacggt

SEQ ID NO: 13391 - RNA, 41 nt, synthetic construct
  source 1..41: mol_type = other RNA
cacgccccccatgctctttgtgttcattgccctgggtcggt

SEQ ID NO: 13392 - RNA, 41 nt, synthetic construct
  source 1..41: mol_type = other RNA
cacgccccccatgctctttgtgttcattgccctggggcggt

SEQ ID NO: 13393 - RNA, 41 nt, synthetic construct
  source 1..41: mol_type = other RNA
cacgccccccatgctctttgtgttcattgccctgggccggt

SEQ ID NO: 13394 - RNA, 42 nt, synthetic construct
  source 1..42: mol_type = other RNA
acacgccccccatgctctttgtgttcattgccctgggtcggt

SEQ ID NO: 13395 - RNA, 42 nt, synthetic construct
  source 1..42: mol_type = other RNA
acacgccccccatgctctttgtgttcattgccctgggccggt

SEQ ID NO: 13396 - RNA, 42 nt, synthetic construct
  source 1..42: mol_type = other RNA
acacgccccccatgctctttgtgttcattgccctgggacggt

SEQ ID NO: 13397 - RNA, 42 nt, synthetic construct
  source 1..42: mol_type = other RNA
acacgccccccatgctctttgtgttcattgccctggggcggt

SEQ ID NO: 13398 - RNA, 43 nt, synthetic construct
  source 1..43: mol_type = other RNA
gacacgccccccatgctctttgtgttcattgccctgggtcggt

SEQ ID NO: 13399 - RNA, 43 nt, synthetic construct
  source 1..43: mol_type = other RNA
gacacgccccccatgctctttgtgttcattgccctgggccggt

SEQ ID NO: 13400 - RNA, 43 nt, synthetic construct
  source 1..43: mol_type = other RNA
gacacgccccccatgctctttgtgttcattgccctgggacggt

SEQ ID NO: 13401 - RNA, 43 nt, synthetic construct
  source 1..43: mol_type = other RNA
gacacgccccccatgctctttgtgttcattgccctggggcggt

SEQ ID NO: 13402 - RNA, 44 nt, synthetic construct
  source 1..44: mol_type = other RNA
cgacacgccccccatgctctttgtgttcattgccctgggacggt

SEQ ID NO: 13403 - RNA, 44 nt, synthetic construct
  source 1..44: mol_type = other RNA
cgacacgccccccatgctctttgtgttcattgccctgggccggt

SEQ ID NO: 13404 - RNA, 44 nt, synthetic construct
  source 1..44: mol_type = other RNA
cgacacgccccccatgctctttgtgttcattgccctgggtcggt

SEQ ID NO: 13405 - RNA, 44 nt, synthetic construct
  source 1..44: mol_type = other RNA
cgacacgccccccatgctctttgtgttcattgccctggggcggt

SEQ ID NO: 13406 - RNA, 45 nt, synthetic construct
  source 1..45: mol_type = other RNA
tcgacacgccccccatgctctttgtgttcattgccctggggcggt

SEQ ID NO: 13407 - RNA, 45 nt, synthetic construct
  source 1..45: mol_type = other RNA
tcgacacgccccccatgctctttgtgttcattgccctgggacggt

SEQ ID NO: 13408 - RNA, 45 nt, synthetic construct
  source 1..45: mol_type = other RNA
tcgacacgccccccatgctctttgtgttcattgccctgggccggt

SEQ ID NO: 13409 - RNA, 45 nt, synthetic construct
  source 1..45: mol_type = other RNA
tcgacacgccccccatgctctttgtgttcattgccctgggtcggt

SEQ ID NO: 13410 - RNA, 46 nt, synthetic construct
  source 1..46: mol_type = other RNA
ttcgacacgccccccatgctctttgtgttcattgccctgggacggt

SEQ ID NO: 13411 - RNA, 46 nt, synthetic construct
  source 1..46: mol_type = other RNA
ttcgacacgccccccatgctctttgtgttcattgccctggggcggt

SEQ ID NO: 13412 - RNA, 46 nt, synthetic construct
  source 1..46: mol_type = other RNA
ttcgacacgccccccatgctctttgtgttcattgccctgggccggt

SEQ ID NO: 13413 - RNA, 46 nt, synthetic construct
  source 1..46: mol_type = other RNA
ttcgacacgccccccatgctctttgtgttcattgccctgggtcggt

SEQ ID NO: 13414 - RNA, 47 nt, synthetic construct
  source 1..47: mol_type = other RNA
cttcgacacgccccccatgctctttgtgttcattgccctgggacggt

SEQ ID NO: 13415 - RNA, 47 nt, synthetic construct
  source 1..47: mol_type = other RNA
cttcgacacgccccccatgctctttgtgttcattgccctggggcggt

SEQ ID NO: 13416 - RNA, 47 nt, synthetic construct
  source 1..47: mol_type = other RNA
cttcgacacgccccccatgctctttgtgttcattgccctgggccggt

SEQ ID NO: 13417 - RNA, 47 nt, synthetic construct
  source 1..47: mol_type = other RNA
cttcgacacgccccccatgctctttgtgttcattgccctgggtcggt

SEQ ID NO: 13418 - RNA, 48 nt, synthetic construct
  source 1..48: mol_type = other RNA
tcttcgacacgccccccatgctctttgtgttcattgccctgggtcggt

SEQ ID NO: 13419 - RNA, 48 nt, synthetic construct
  source 1..48: mol_type = other RNA
tcttcgacacgccccccatgctctttgtgttcattgccctgggacggt

SEQ ID NO: 13420 - RNA, 48 nt, synthetic construct
  source 1..48: mol_type = other RNA
tcttcgacacgccccccatgctctttgtgttcattgccctgggccggt

SEQ ID NO: 13421 - RNA, 48 nt, synthetic construct
  source 1..48: mol_type = other RNA
tcttcgacacgccccccatgctctttgtgttcattgccctggggcggt

SEQ ID NO: 13422 - RNA, 49 nt, synthetic construct
  source 1..49: mol_type = other RNA
ttcttcgacacgccccccatgctctttgtgttcattgccctgggccggt

SEQ ID NO: 13423 - RNA, 49 nt, synthetic construct
  source 1..49: mol_type = other RNA
ttcttcgacacgccccccatgctctttgtgttcattgccctgggtcggt

SEQ ID NO: 13424 - RNA, 49 nt, synthetic construct
  source 1..49: mol_type = other RNA
ttcttcgacacgccccccatgctctttgtgttcattgccctgggacggt

SEQ ID NO: 13425 - RNA, 49 nt, synthetic construct
  source 1..49: mol_type = other RNA
ttcttcgacacgccccccatgctctttgtgttcattgccctggggcggt

SEQ ID NO: 13426 - RNA, 50 nt, synthetic construct
  source 1..50: mol_type = other RNA
attcttcgacacgccccccatgctctttgtgttcattgccctgggtcggt

SEQ ID NO: 13427 - RNA, 50 nt, synthetic construct
  source 1..50: mol_type = other RNA
attcttcgacacgccccccatgctctttgtgttcattgccctgggacggt

SEQ ID NO: 13428 - RNA, 50 nt, synthetic construct
  source 1..50: mol_type = other RNA
attcttcgacacgccccccatgctctttgtgttcattgccctgggccggt

SEQ ID NO: 13429 - RNA, 50 nt, synthetic construct
  source 1..50: mol_type = other RNA
attcttcgacacgccccccatgctctttgtgttcattgccctggggcggt

SEQ ID NO: 13430 - RNA, 51 nt, synthetic construct
  source 1..51: mol_type = other RNA
cattcttcgacacgccccccatgctctttgtgttcattgccctgggccggt

SEQ ID NO: 13431 - RNA, 51 nt, synthetic construct
  source 1..51: mol_type = other RNA
cattcttcgacacgccccccatgctctttgtgttcattgccctggggcggt

SEQ ID NO: 13432 - RNA, 51 nt, synthetic construct
  source 1..51: mol_type = other RNA
cattcttcgacacgccccccatgctctttgtgttcattgccctgggacggt

SEQ ID NO: 13433 - RNA, 51 nt, synthetic construct
  source 1..51: mol_type = other RNA
cattcttcgacacgccccccatgctctttgtgttcattgccctgggtcggt

SEQ ID NO: 13434 - RNA, 52 nt, synthetic construct
  source 1..52: mol_type = other RNA
acattcttcgacacgccccccatgctctttgtgttcattgccctgggtcggt

SEQ ID NO: 13435 - RNA, 52 nt, synthetic construct
  source 1..52: mol_type = other RNA
acattcttcgacacgccccccatgctctttgtgttcattgccctgggccggt

SEQ ID NO: 13436 - RNA, 52 nt, synthetic construct
  source 1..52: mol_type = other RNA
acattcttcgacacgccccccatgctctttgtgttcattgccctgggacggt

SEQ ID NO: 13437 - RNA, 52 nt, synthetic construct
  source 1..52: mol_type = other RNA
acattcttcgacacgccccccatgctctttgtgttcattgccctggggcggt

SEQ ID NO: 13438 - RNA, 53 nt, synthetic construct
  source 1..53: mol_type = other RNA
gacattcttcgacacgccccccatgctctttgtgttcattgccctggggcggt

SEQ ID NO: 13439 - RNA, 53 nt, synthetic construct
  source 1..53: mol_type = other RNA
gacattcttcgacacgccccccatgctctttgtgttcattgccctgggacggt

SEQ ID NO: 13440 - RNA, 53 nt, synthetic construct
  source 1..53: mol_type = other RNA
gacattcttcgacacgccccccatgctctttgtgttcattgccctgggtcggt

SEQ ID NO: 13441 - RNA, 53 nt, synthetic construct
  source 1..53: mol_type = other RNA
gacattcttcgacacgccccccatgctctttgtgttcattgccctgggccggt

SEQ ID NO: 13442 - RNA, 54 nt, synthetic construct
  source 1..54: mol_type = other RNA
tgacattcttcgacacgccccccatgctctttgtgttcattgccctgggtcggt

SEQ ID NO: 13443 - RNA, 54 nt, synthetic construct
  source 1..54: mol_type = other RNA
tgacattcttcgacacgccccccatgctctttgtgttcattgccctgggccggt

SEQ ID NO: 13444 - RNA, 54 nt, synthetic construct
  source 1..54: mol_type = other RNA
tgacattcttcgacacgccccccatgctctttgtgttcattgccctggggcggt

SEQ ID NO: 13445 - RNA, 54 nt, synthetic construct
  source 1..54: mol_type = other RNA
tgacattcttcgacacgccccccatgctctttgtgttcattgccctgggacggt

SEQ ID NO: 13446 - RNA, 55 nt, synthetic construct
  source 1..55: mol_type = other RNA
gtgacattcttcgacacgccccccatgctctttgtgttcattgccctgggacggt

SEQ ID NO: 13447 - RNA, 55 nt, synthetic construct
  source 1..55: mol_type = other RNA
gtgacattcttcgacacgccccccatgctctttgtgttcattgccctgggccggt

SEQ ID NO: 13448 - RNA, 55 nt, synthetic construct
  source 1..55: mol_type = other RNA
gtgacattcttcgacacgccccccatgctctttgtgttcattgccctgggtcggt

SEQ ID NO: 13449 - RNA, 55 nt, synthetic construct
  source 1..55: mol_type = other RNA
gtgacattcttcgacacgccccccatgctctttgtgttcattgccctggggcggt

SEQ ID NO: 13450 - RNA, 56 nt, synthetic construct
  source 1..56: mol_type = other RNA
tgtgacattcttcgacacgccccccatgctctttgtgttcattgccctgggacggt

SEQ ID NO: 13451 - RNA, 56 nt, synthetic construct
  source 1..56: mol_type = other RNA
tgtgacattcttcgacacgccccccatgctctttgtgttcattgccctggggcggt

SEQ ID NO: 13452 - RNA, 56 nt, synthetic construct
  source 1..56: mol_type = other RNA
tgtgacattcttcgacacgccccccatgctctttgtgttcattgccctgggtcggt

SEQ ID NO: 13453 - RNA, 56 nt, synthetic construct
  source 1..56: mol_type = other RNA
tgtgacattcttcgacacgccccccatgctctttgtgttcattgccctgggccggt

SEQ ID NO: 13454 - RNA, 57 nt, synthetic construct
  source 1..57: mol_type = other RNA
ctgtgacattcttcgacacgccccccatgctctttgtgttcattgccctggggcggt

SEQ ID NO: 13455 - RNA, 57 nt, synthetic construct
  source 1..57: mol_type = other RNA
ctgtgacattcttcgacacgccccccatgctctttgtgttcattgccctgggacggt

SEQ ID NO: 13456 - RNA, 57 nt, synthetic construct
  source 1..57: mol_type = other RNA
ctgtgacattcttcgacacgccccccatgctctttgtgttcattgccctgggccggt

SEQ ID NO: 13457 - RNA, 57 nt, synthetic construct
  source 1..57: mol_type = other RNA
ctgtgacattcttcgacacgccccccatgctctttgtgttcattgccctgggtcggt

SEQ ID NO: 13458 - RNA, 58 nt, synthetic construct
  source 1..58: mol_type = other RNA
cctgtgacattcttcgacacgccccccatgctctttgtgttcattgccctgggacggt

SEQ ID NO: 13459 - RNA, 58 nt, synthetic construct
  source 1..58: mol_type = other RNA
cctgtgacattcttcgacacgccccccatgctctttgtgttcattgccctggggcggt

SEQ ID NO: 13460 - RNA, 58 nt, synthetic construct
  source 1..58: mol_type = other RNA
cctgtgacattcttcgacacgccccccatgctctttgtgttcattgccctgggtcggt

SEQ ID NO: 13461 - RNA, 58 nt, synthetic construct
  source 1..58: mol_type = other RNA
cctgtgacattcttcgacacgccccccatgctctttgtgttcattgccctgggccggt

SEQ ID NO: 13462 - RNA, 59 nt, synthetic construct
  source 1..59: mol_type = other RNA
ccctgtgacattcttcgacacgccccccatgctctttgtgttcattgccctgggccggt

SEQ ID NO: 13463 - RNA, 59 nt, synthetic construct
  source 1..59: mol_type = other RNA
ccctgtgacattcttcgacacgccccccatgctctttgtgttcattgccctgggtcggt

SEQ ID NO: 13464 - RNA, 59 nt, synthetic construct
  source 1..59: mol_type = other RNA
ccctgtgacattcttcgacacgccccccatgctctttgtgttcattgccctgggacggt

SEQ ID NO: 13465 - RNA, 59 nt, synthetic construct
  source 1..59: mol_type = other RNA
ccctgtgacattcttcgacacgccccccatgctctttgtgttcattgccctggggcggt

SEQ ID NO: 13466 - RNA, 60 nt, synthetic construct
  source 1..60: mol_type = other RNA
gccctgtgacattcttcgacacgccccccatgctctttgtgttcattgccctgggtcggt

SEQ ID NO: 13467 - RNA, 60 nt, synthetic construct
  source 1..60: mol_type = other RNA
gccctgtgacattcttcgacacgccccccatgctctttgtgttcattgccctgggccggt

SEQ ID NO: 13468 - RNA, 60 nt, synthetic construct
  source 1..60: mol_type = other RNA
gccctgtgacattcttcgacacgccccccatgctctttgtgttcattgccctgggacggt

SEQ ID NO: 13469 - RNA, 60 nt, synthetic construct
  source 1..60: mol_type = other RNA
gccctgtgacattcttcgacacgccccccatgctctttgtgttcattgccctggggcggt

SEQ ID NO: 13470 - RNA, 61 nt, synthetic construct
  source 1..61: mol_type = other RNA
agccctgtgacattcttcgacacgccccccatgctctttgtgttcattgccctggggcggt

SEQ ID NO: 13471 - RNA, 61 nt, synthetic construct
  source 1..61: mol_type = other RNA
agccctgtgacattcttcgacacgccccccatgctctttgtgttcattgccctgggtcggt

SEQ ID NO: 13472 - RNA, 61 nt, synthetic construct
  source 1..61: mol_type = other RNA
agccctgtgacattcttcgacacgccccccatgctctttgtgttcattgccctgggccggt

SEQ ID NO: 13473 - RNA, 61 nt, synthetic construct
  source 1..61: mol_type = other RNA
agccctgtgacattcttcgacacgccccccatgctctttgtgttcattgccctgggacggt

SEQ ID NO: 13474 - RNA, 62 nt, synthetic construct
  source 1..62: mol_type = other RNA
gagccctgtgacattcttcgacacgccccccatgctctttgtgttcattgccctgggccggt

SEQ ID NO: 13475 - RNA, 62 nt, synthetic construct
  source 1..62: mol_type = other RNA
gagccctgtgacattcttcgacacgccccccatgctctttgtgttcattgccctgggacggt

SEQ ID NO: 13476 - RNA, 62 nt, synthetic construct
  source 1..62: mol_type = other RNA
gagccctgtgacattcttcgacacgccccccatgctctttgtgttcattgccctggggcggt

SEQ ID NO: 13477 - RNA, 62 nt, synthetic construct
  source 1..62: mol_type = other RNA
gagccctgtgacattcttcgacacgccccccatgctctttgtgttcattgccctgggtcggt

SEQ ID NO: 13478 - RNA, 63 nt, synthetic construct
  source 1..63: mol_type = other RNA
ggagccctgtgacattcttcgacacgccccccatgctctttgtgttcattgccctgggtcggt

SEQ ID NO: 13479 - RNA, 63 nt, synthetic construct
  source 1..63: mol_type = other RNA
ggagccctgtgacattcttcgacacgccccccatgctctttgtgttcattgccctggggcggt

SEQ ID NO: 13480 - RNA, 63 nt, synthetic construct
  source 1..63: mol_type = other RNA
ggagccctgtgacattcttcgacacgccccccatgctctttgtgttcattgccctgggccggt

SEQ ID NO: 13481 - RNA, 63 nt, synthetic construct
  source 1..63: mol_type = other RNA
ggagccctgtgacattcttcgacacgccccccatgctctttgtgttcattgccctgggacggt

SEQ ID NO: 13482 - RNA, 64 nt, synthetic construct
  source 1..64: mol_type = other RNA
aggagccctgtgacattcttcgacacgccccccatgctctttgtgttcattgccctggggcggt

SEQ ID NO: 13483 - RNA, 64 nt, synthetic construct
  source 1..64: mol_type = other RNA
aggagccctgtgacattcttcgacacgccccccatgctctttgtgttcattgccctgggccggt

SEQ ID NO: 13484 - RNA, 64 nt, synthetic construct
  source 1..64: mol_type = other RNA
aggagccctgtgacattcttcgacacgccccccatgctctttgtgttcattgccctgggtcggt

SEQ ID NO: 13485 - RNA, 64 nt, synthetic construct
  source 1..64: mol_type = other RNA
aggagccctgtgacattcttcgacacgccccccatgctctttgtgttcattgccctgggacggt

SEQ ID NO: 13486 - RNA, 65 nt, synthetic construct
  source 1..65: mol_type = other RNA
gaggagccctgtgacattcttcgacacgccccccatgctctttgtgttcattgccctgggccggt

SEQ ID NO: 13487 - RNA, 65 nt, synthetic construct
  source 1..65: mol_type = other RNA
gaggagccctgtgacattcttcgacacgccccccatgctctttgtgttcattgccctgggtcggt

SEQ ID NO: 13488 - RNA, 65 nt, synthetic construct
  source 1..65: mol_type = other RNA
gaggagccctgtgacattcttcgacacgccccccatgctctttgtgttcattgccctgggacggt

SEQ ID NO: 13489 - RNA, 65 nt, synthetic construct
  source 1..65: mol_type = other RNA
gaggagccctgtgacattcttcgacacgccccccatgctctttgtgttcattgccctggggcggt

SEQ ID NO: 13490 - RNA, 66 nt, synthetic construct
  source 1..66: mol_type = other RNA
agaggagccctgtgacattcttcgacacgccccccatgctctttgtgttcattgccctggggcggt

SEQ ID NO: 13491 - RNA, 66 nt, synthetic construct
  source 1..66: mol_type = other RNA
agaggagccctgtgacattcttcgacacgccccccatgctctttgtgttcattgccctgggacggt

SEQ ID NO: 13492 - RNA, 66 nt, synthetic construct
  source 1..66: mol_type = other RNA
agaggagccctgtgacattcttcgacacgccccccatgctctttgtgttcattgccctgggccggt

SEQ ID NO: 13493 - RNA, 66 nt, synthetic construct
  source 1..66: mol_type = other RNA
agaggagccctgtgacattcttcgacacgccccccatgctctttgtgttcattgccctgggtcggt

SEQ ID NO: 13494 - RNA, 67 nt, synthetic construct
  source 1..67: mol_type = other RNA
gagaggagccctgtgacattcttcgacacgccccccatgctctttgtgttcattgccctgggccggt

SEQ ID NO: 13495 - RNA, 67 nt, synthetic construct
  source 1..67: mol_type = other RNA
gagaggagccctgtgacattcttcgacacgccccccatgctctttgtgttcattgccctgggtcggt

SEQ ID NO: 13496 - RNA, 67 nt, synthetic construct
  source 1..67: mol_type = other RNA
gagaggagccctgtgacattcttcgacacgccccccatgctctttgtgttcattgccctgggacggt

SEQ ID NO: 13497 - RNA, 67 nt, synthetic construct
  source 1..67: mol_type = other RNA
gagaggagccctgtgacattcttcgacacgccccccatgctctttgtgttcattgccctggggcggt

SEQ ID NO: 13498 - RNA, 68 nt, synthetic construct
  source 1..68: mol_type = other RNA
ggagaggagccctgtgacattcttcgacacgccccccatgctctttgtgttcattgccctgggtcggt

SEQ ID NO: 13499 - RNA, 68 nt, synthetic construct
  source 1..68: mol_type = other RNA
ggagaggagccctgtgacattcttcgacacgccccccatgctctttgtgttcattgccctgggacggt

SEQ ID NO: 13500 - RNA, 68 nt, synthetic construct
  source 1..68: mol_type = other RNA
ggagaggagccctgtgacattcttcgacacgccccccatgctctttgtgttcattgccctgggccggt

SEQ ID NO: 13501 - RNA, 68 nt, synthetic construct
  source 1..68: mol_type = other RNA
ggagaggagccctgtgacattcttcgacacgccccccatgctctttgtgttcattgccctggggcggt

SEQ ID NO: 13502 - RNA, 69 nt, synthetic construct
  source 1..69: mol_type = other RNA
cggagaggagccctgtgacattcttcgacacgccccccatgctctttgtgttcattgccctgggacggt

SEQ ID NO: 13503 - RNA, 69 nt, synthetic construct
  source 1..69: mol_type = other RNA
cggagaggagccctgtgacattcttcgacacgccccccatgctctttgtgttcattgccctggggcggt

SEQ ID NO: 13504 - RNA, 69 nt, synthetic construct
  source 1..69: mol_type = other RNA
cggagaggagccctgtgacattcttcgacacgccccccatgctctttgtgttcattgccctgggccggt

SEQ ID NO: 13505 - RNA, 69 nt, synthetic construct
  source 1..69: mol_type = other RNA
cggagaggagccctgtgacattcttcgacacgccccccatgctctttgtgttcattgccctgggtcggt

SEQ ID NO: 13506 - RNA, 70 nt, synthetic construct
  source 1..70: mol_type = other RNA
gcggagaggagccctgtgacattcttcgacacgccccccatgctctttgtgttcattgccctgggacggt

SEQ ID NO: 13507 - RNA, 70 nt, synthetic construct
  source 1..70: mol_type = other RNA
gcggagaggagccctgtgacattcttcgacacgccccccatgctctttgtgttcattgccctgggccggt

SEQ ID NO: 13508 - RNA, 70 nt, synthetic construct
  source 1..70: mol_type = other RNA
gcggagaggagccctgtgacattcttcgacacgccccccatgctctttgtgttcattgccctgggtcggt

SEQ ID NO: 13509 - RNA, 70 nt, synthetic construct
  source 1..70: mol_type = other RNA
gcggagaggagccctgtgacattcttcgacacgccccccatgctctttgtgttcattgccctggggcggt

SEQ ID NO: 13510 - RNA, 71 nt, synthetic construct
  source 1..71: mol_type = other RNA
ggcggagaggagccctgtgacattcttcgacacgccccccatgctctttgtgttcattgccctgggtcggt

SEQ ID NO: 13511 - RNA, 71 nt, synthetic construct
  source 1..71: mol_type = other RNA
ggcggagaggagccctgtgacattcttcgacacgccccccatgctctttgtgttcattgccctgggacggt

SEQ ID NO: 13512 - RNA, 71 nt, synthetic construct
  source 1..71: mol_type = other RNA
ggcggagaggagccctgtgacattcttcgacacgccccccatgctctttgtgttcattgccctggggcggt

SEQ ID NO: 13513 - RNA, 71 nt, synthetic construct
  source 1..71: mol_type = other RNA
ggcggagaggagccctgtgacattcttcgacacgccccccatgctctttgtgttcattgccctgggccggt

SEQ ID NO: 13514 - RNA, 72 nt, synthetic construct
  source 1..72: mol_type = other RNA
aggcggagaggagccctgtgacattcttcgacacgccccccatgctctttgtgttcattgccctggggcggt

SEQ ID NO: 13515 - RNA, 72 nt, synthetic construct
  source 1..72: mol_type = other RNA
aggcggagaggagccctgtgacattcttcgacacgccccccatgctctttgtgttcattgccctgggccggt

SEQ ID NO: 13516 - RNA, 72 nt, synthetic construct
  source 1..72: mol_type = other RNA
aggcggagaggagccctgtgacattcttcgacacgccccccatgctctttgtgttcattgccctgggacggt

SEQ ID NO: 13517 - RNA, 72 nt, synthetic construct
  source 1..72: mol_type = other RNA
aggcggagaggagccctgtgacattcttcgacacgccccccatgctctttgtgttcattgccctgggtcggt

SEQ ID NO: 13518 - RNA, 73 nt, synthetic construct
  source 1..73: mol_type = other RNA
aaggcggagaggagccctgtgacattcttcgacacgccccccatgctctttgtgttcattgccctggggcggt

SEQ ID NO: 13519 - RNA, 73 nt, synthetic construct
  source 1..73: mol_type = other RNA
aaggcggagaggagccctgtgacattcttcgacacgccccccatgctctttgtgttcattgccctgggtcggt

SEQ ID NO: 13520 - RNA, 73 nt, synthetic construct
  source 1..73: mol_type = other RNA
aaggcggagaggagccctgtgacattcttcgacacgccccccatgctctttgtgttcattgccctgggccggt

SEQ ID NO: 13521 - RNA, 73 nt, synthetic construct
  source 1..73: mol_type = other RNA
aaggcggagaggagccctgtgacattcttcgacacgccccccatgctctttgtgttcattgccctgggacggt

SEQ ID NO: 13522 - RNA, 74 nt, synthetic construct
  source 1..74: mol_type = other RNA
gaaggcggagaggagccctgtgacattcttcgacacgccccccatgctctttgtgttcattgccctgggccggt

SEQ ID NO: 13523 - RNA, 74 nt, synthetic construct
  source 1..74: mol_type = other RNA
gaaggcggagaggagccctgtgacattcttcgacacgccccccatgctctttgtgttcattgccctggggcggt

SEQ ID NO: 13524 - RNA, 74 nt, synthetic construct
  source 1..74: mol_type = other RNA
gaaggcggagaggagccctgtgacattcttcgacacgccccccatgctctttgtgttcattgccctgggacggt

SEQ ID NO: 13525 - RNA, 74 nt, synthetic construct
  source 1..74: mol_type = other RNA
gaaggcggagaggagccctgtgacattcttcgacacgccccccatgctctttgtgttcattgccctgggtcggt

SEQ ID NO: 13526 - RNA, 75 nt, synthetic construct
  source 1..75: mol_type = other RNA
agaaggcggagaggagccctgtgacattcttcgacacgccccccatgctctttgtgttcattgccctgggacggt

SEQ ID NO: 13527 - RNA, 75 nt, synthetic construct
  source 1..75: mol_type = other RNA
agaaggcggagaggagccctgtgacattcttcgacacgccccccatgctctttgtgttcattgccctgggccggt

SEQ ID NO: 13528 - RNA, 75 nt, synthetic construct
  source 1..75: mol_type = other RNA
agaaggcggagaggagccctgtgacattcttcgacacgccccccatgctctttgtgttcattgccctggggcggt

SEQ ID NO: 13529 - RNA, 75 nt, synthetic construct
  source 1..75: mol_type = other RNA
agaaggcggagaggagccctgtgacattcttcgacacgccccccatgctctttgtgttcattgccctgggtcggt

SEQ ID NO: 13530 - RNA, 76 nt, synthetic construct
  source 1..76: mol_type = other RNA
gagaaggcggagaggagccctgtgacattcttcgacacgccccccatgctctttgtgttcattgccctgggacggt

SEQ ID NO: 13531 - RNA, 76 nt, synthetic construct
  source 1..76: mol_type = other RNA
gagaaggcggagaggagccctgtgacattcttcgacacgccccccatgctctttgtgttcattgccctggggcggt

SEQ ID NO: 13532 - RNA, 76 nt, synthetic construct
  source 1..76: mol_type = other RNA
gagaaggcggagaggagccctgtgacattcttcgacacgccccccatgctctttgtgttcattgccctgggtcggt

SEQ ID NO: 13533 - RNA, 76 nt, synthetic construct
  source 1..76: mol_type = other RNA
gagaaggcggagaggagccctgtgacattcttcgacacgccccccatgctctttgtgttcattgccctgggccggt

SEQ ID NO: 13534 - RNA, 77 nt, synthetic construct
  source 1..77: mol_type = other RNA
tgagaaggcggagaggagccctgtgacattcttcgacacgccccccatgctctttgtgttcattgccctgggccggt

SEQ ID NO: 13535 - RNA, 77 nt, synthetic construct
  source 1..77: mol_type = other RNA
tgagaaggcggagaggagccctgtgacattcttcgacacgccccccatgctctttgtgttcattgccctgggtcggt

SEQ ID NO: 13536 - RNA, 77 nt, synthetic construct
  source 1..77: mol_type = other RNA
tgagaaggcggagaggagccctgtgacattcttcgacacgccccccatgctctttgtgttcattgccctgggacggt

SEQ ID NO: 13537 - RNA, 77 nt, synthetic construct
  source 1..77: mol_type = other RNA
tgagaaggcggagaggagccctgtgacattcttcgacacgccccccatgctctttgtgttcattgccctggggcggt

SEQ ID NO: 13538 - RNA, 78 nt, synthetic construct
  source 1..78: mol_type = other RNA
ctgagaaggcggagaggagccctgtgacattcttcgacacgccccccatgctctttgtgttcattgccctggggcggt

SEQ ID NO: 13539 - RNA, 78 nt, synthetic construct
  source 1..78: mol_type = other RNA
ctgagaaggcggagaggagccctgtgacattcttcgacacgccccccatgctctttgtgttcattgccctgggccggt

SEQ ID NO: 13540 - RNA, 78 nt, synthetic construct
  source 1..78: mol_type = other RNA
ctgagaaggcggagaggagccctgtgacattcttcgacacgccccccatgctctttgtgttcattgccctgggtcggt

SEQ ID NO: 13541 - RNA, 78 nt, synthetic construct
  source 1..78: mol_type = other RNA
ctgagaaggcggagaggagccctgtgacattcttcgacacgccccccatgctctttgtgttcattgccctgggacggt

SEQ ID NO: 13542 - RNA, 79 nt, synthetic construct
  source 1..79: mol_type = other RNA
gctgagaaggcggagaggagccctgtgacattcttcgacacgccccccatgctctttgtgttcattgccctgggtcggt

SEQ ID NO: 13543 - RNA, 79 nt, synthetic construct
  source 1..79: mol_type = other RNA
gctgagaaggcggagaggagccctgtgacattcttcgacacgccccccatgctctttgtgttcattgccctgggccggt

SEQ ID NO: 13544 - RNA, 79 nt, synthetic construct
  source 1..79: mol_type = other RNA
gctgagaaggcggagaggagccctgtgacattcttcgacacgccccccatgctctttgtgttcattgccctggggcggt

SEQ ID NO: 13545 - RNA, 79 nt, synthetic construct
  source 1..79: mol_type = other RNA
gctgagaaggcggagaggagccctgtgacattcttcgacacgccccccatgctctttgtgttcattgccctgggacggt

SEQ ID NO: 13546 - RNA, 80 nt, synthetic construct
  source 1..80: mol_type = other RNA
ggctgagaaggcggagaggagccctgtgacattcttcgacacgccccccatgctctttgtgttcattgccctgggtcggt

SEQ ID NO: 13547 - RNA, 80 nt, synthetic construct
  source 1..80: mol_type = other RNA
ggctgagaaggcggagaggagccctgtgacattcttcgacacgccccccatgctctttgtgttcattgccctggggcggt

SEQ ID NO: 13548 - RNA, 80 nt, synthetic construct
  source 1..80: mol_type = other RNA
ggctgagaaggcggagaggagccctgtgacattcttcgacacgccccccatgctctttgtgttcattgccctgggccggt

SEQ ID NO: 13549 - RNA, 80 nt, synthetic construct
  source 1..80: mol_type = other RNA
ggctgagaaggcggagaggagccctgtgacattcttcgacacgccccccatgctctttgtgttcattgccctgggacggt

SEQ ID NO: 13550 - RNA, 81 nt, synthetic construct
  source 1..81: mol_type = other RNA
tggctgagaaggcggagaggagccctgtgacattcttcgacacgccccccatgctctttgtgttcattgccctgggacggt

SEQ ID NO: 13551 - RNA, 81 nt, synthetic construct
  source 1..81: mol_type = other RNA
tggctgagaaggcggagaggagccctgtgacattcttcgacacgccccccatgctctttgtgttcattgccctgggtcggt

SEQ ID NO: 13552 - RNA, 81 nt, synthetic construct
  source 1..81: mol_type = other RNA
tggctgagaaggcggagaggagccctgtgacattcttcgacacgccccccatgctctttgtgttcattgccctggggcggt

SEQ ID NO: 13553 - RNA, 81 nt, synthetic construct
  source 1..81: mol_type = other RNA
tggctgagaaggcggagaggagccctgtgacattcttcgacacgccccccatgctctttgtgttcattgccctgggccggt

SEQ ID NO: 13554 - RNA, 82 nt, synthetic construct
  source 1..82: mol_type = other RNA
gtggctgagaaggcggagaggagccctgtgacattcttcgacacgccccccatgctctttgtgttcattgccctgggtcggt

SEQ ID NO: 13555 - RNA, 82 nt, synthetic construct
  source 1..82: mol_type = other RNA
gtggctgagaaggcggagaggagccctgtgacattcttcgacacgccccccatgctctttgtgttcattgccctggggcggt

SEQ ID NO: 13556 - RNA, 82 nt, synthetic construct
  source 1..82: mol_type = other RNA
gtggctgagaaggcggagaggagccctgtgacattcttcgacacgccccccatgctctttgtgttcattgccctgggacggt

SEQ ID NO: 13557 - RNA, 82 nt, synthetic construct
  source 1..82: mol_type = other RNA
gtggctgagaaggcggagaggagccctgtgacattcttcgacacgccccccatgctctttgtgttcattgccctgggccggt

SEQ ID NO: 13558 - RNA, 83 nt, synthetic construct
  source 1..83: mol_type = other RNA
tgtggctgagaaggcggagaggagccctgtgacattcttcgacacgccccccatgctctttgtgttcattgccctgggacggt

SEQ ID NO: 13559 - RNA, 83 nt, synthetic construct
  source 1..83: mol_type = other RNA
tgtggctgagaaggcggagaggagccctgtgacattcttcgacacgccccccatgctctttgtgttcattgccctgggccggt

SEQ ID NO: 13560 - RNA, 83 nt, synthetic construct
  source 1..83: mol_type = other RNA
tgtggctgagaaggcggagaggagccctgtgacattcttcgacacgccccccatgctctttgtgttcattgccctggggcggt

SEQ ID NO: 13561 - RNA, 83 nt, synthetic construct
  source 1..83: mol_type = other RNA
tgtggctgagaaggcggagaggagccctgtgacattcttcgacacgccccccatgctctttgtgttcattgccctgggtcggt

SEQ ID NO: 13562 - RNA, 84 nt, synthetic construct
  source 1..84: mol_type = other RNA
ctgtggctgagaaggcggagaggagccctgtgacattcttcgacacgccccccatgctctttgtgttcattgccctggggcggt

SEQ ID NO: 13563 - RNA, 84 nt, synthetic construct
  source 1..84: mol_type = other RNA
ctgtggctgagaaggcggagaggagccctgtgacattcttcgacacgccccccatgctctttgtgttcattgccctgggccggt

SEQ ID NO: 13564 - RNA, 84 nt, synthetic construct
  source 1..84: mol_type = other RNA
ctgtggctgagaaggcggagaggagccctgtgacattcttcgacacgccccccatgctctttgtgttcattgccctgggacggt

SEQ ID NO: 13565 - RNA, 84 nt, synthetic construct
  source 1..84: mol_type = other RNA
ctgtggctgagaaggcggagaggagccctgtgacattcttcgacacgccccccatgctctttgtgttcattgccctgggtcggt

SEQ ID NO: 13566 - RNA, 85 nt, synthetic construct
  source 1..85: mol_type = other RNA
gctgtggctgagaaggcggagaggagccctgtgacattcttcgacacgccccccatgctctttgtgttcattgccctgggacggt

SEQ ID NO: 13567 - RNA, 85 nt, synthetic construct
  source 1..85: mol_type = other RNA
gctgtggctgagaaggcggagaggagccctgtgacattcttcgacacgccccccatgctctttgtgttcattgccctgggccggt

SEQ ID NO: 13568 - RNA, 85 nt, synthetic construct
  source 1..85: mol_type = other RNA
gctgtggctgagaaggcggagaggagccctgtgacattcttcgacacgccccccatgctctttgtgttcattgccctggggcggt

SEQ ID NO: 13569 - RNA, 85 nt, synthetic construct
  source 1..85: mol_type = other RNA
gctgtggctgagaaggcggagaggagccctgtgacattcttcgacacgccccccatgctctttgtgttcattgccctgggtcggt

SEQ ID NO: 13570 - RNA, 86 nt, synthetic construct
  source 1..86: mol_type = other RNA
tgctgtggctgagaaggcggagaggagccctgtgacattcttcgacacgccccccatgctctttgtgttcattgccctgggtcggt

SEQ ID NO: 13571 - RNA, 86 nt, synthetic construct
  source 1..86: mol_type = other RNA
tgctgtggctgagaaggcggagaggagccctgtgacattcttcgacacgccccccatgctctttgtgttcattgccctggggcggt

SEQ ID NO: 13572 - RNA, 86 nt, synthetic construct
  source 1..86: mol_type = other RNA
tgctgtggctgagaaggcggagaggagccctgtgacattcttcgacacgccccccatgctctttgtgttcattgccctgggccggt

SEQ ID NO: 13573 - RNA, 86 nt, synthetic construct
  source 1..86: mol_type = other RNA
tgctgtggctgagaaggcggagaggagccctgtgacattcttcgacacgccccccatgctctttgtgttcattgccctgggacggt

SEQ ID NO: 13574 - RNA, 87 nt, synthetic construct
  source 1..87: mol_type = other RNA
ttgctgtggctgagaaggcggagaggagccctgtgacattcttcgacacgccccccatgctctttgtgttcattgccctgggccggt

SEQ ID NO: 13575 - RNA, 87 nt, synthetic construct
  source 1..87: mol_type = other RNA
ttgctgtggctgagaaggcggagaggagccctgtgacattcttcgacacgccccccatgctctttgtgttcattgccctgggtcggt

SEQ ID NO: 13576 - RNA, 87 nt, synthetic construct
  source 1..87: mol_type = other RNA
ttgctgtggctgagaaggcggagaggagccctgtgacattcttcgacacgccccccatgctctttgtgttcattgccctgggacggt

SEQ ID NO: 13577 - RNA, 87 nt, synthetic construct
  source 1..87: mol_type = other RNA
ttgctgtggctgagaaggcggagaggagccctgtgacattcttcgacacgccccccatgctctttgtgttcattgccctggggcggt

SEQ ID NO: 13578 - RNA, 88 nt, synthetic construct
  source 1..88: mol_type = other RNA
gttgctgtggctgagaaggcggagaggagccctgtgacattcttcgacacgccccccatgctctttgtgttcattgccctgggacggt

SEQ ID NO: 13579 - RNA, 88 nt, synthetic construct
  source 1..88: mol_type = other RNA
gttgctgtggctgagaaggcggagaggagccctgtgacattcttcgacacgccccccatgctctttgtgttcattgccctggggcggt

SEQ ID NO: 13580 - RNA, 88 nt, synthetic construct
  source 1..88: mol_type = other RNA
gttgctgtggctgagaaggcggagaggagccctgtgacattcttcgacacgccccccatgctctttgtgttcattgccctgggtcggt

SEQ ID NO: 13581 - RNA, 88 nt, synthetic construct
  source 1..88: mol_type = other RNA
gttgctgtggctgagaaggcggagaggagccctgtgacattcttcgacacgccccccatgctctttgtgttcattgccctgggccggt

SEQ ID NO: 13582 - RNA, 89 nt, synthetic construct
  source 1..89: mol_type = other RNA
ggttgctgtggctgagaaggcggagaggagccctgtgacattcttcgacacgccccccatgctctttgtgttcattgccctgggtcggt

SEQ ID NO: 13583 - RNA, 89 nt, synthetic construct
  source 1..89: mol_type = other RNA
ggttgctgtggctgagaaggcggagaggagccctgtgacattcttcgacacgccccccatgctctttgtgttcattgccctgggacggt

SEQ ID NO: 13584 - RNA, 89 nt, synthetic construct
  source 1..89: mol_type = other RNA
ggttgctgtggctgagaaggcggagaggagccctgtgacattcttcgacacgccccccatgctctttgtgttcattgccctgggccggt

SEQ ID NO: 13585 - RNA, 89 nt, synthetic construct
  source 1..89: mol_type = other RNA
ggttgctgtggctgagaaggcggagaggagccctgtgacattcttcgacacgccccccatgctctttgtgttcattgccctggggcggt

SEQ ID NO: 13586 - RNA, 90 nt, synthetic construct
  source 1..90: mol_type = other RNA
tggttgctgtggctgagaaggcggagaggagccctgtgacattcttcgacacgccccccatgctctttgtgttcattgccctgggccggt

SEQ ID NO: 13587 - RNA, 90 nt, synthetic construct
  source 1..90: mol_type = other RNA
tggttgctgtggctgagaaggcggagaggagccctgtgacattcttcgacacgccccccatgctctttgtgttcattgccctggggcggt

SEQ ID NO: 13588 - RNA, 90 nt, synthetic construct
  source 1..90: mol_type = other RNA
tggttgctgtggctgagaaggcggagaggagccctgtgacattcttcgacacgccccccatgctctttgtgttcattgccctgggtcggt

SEQ ID NO: 13589 - RNA, 90 nt, synthetic construct
  source 1..90: mol_type = other RNA
tggttgctgtggctgagaaggcggagaggagccctgtgacattcttcgacacgccccccatgctctttgtgttcattgccctgggacggt

SEQ ID NO: 13590 - RNA, 91 nt, synthetic construct
  source 1..91: mol_type = other RNA
gtggttgctgtggctgagaaggcggagaggagccctgtgacattcttcgacacgccccccatgctctttgtgttcattgccctggggcggt

SEQ ID NO: 13591 - RNA, 91 nt, synthetic construct
  source 1..91: mol_type = other RNA
gtggttgctgtggctgagaaggcggagaggagccctgtgacattcttcgacacgccccccatgctctttgtgttcattgccctgggccggt

SEQ ID NO: 13592 - RNA, 91 nt, synthetic construct
  source 1..91: mol_type = other RNA
gtggttgctgtggctgagaaggcggagaggagccctgtgacattcttcgacacgccccccatgctctttgtgttcattgccctgggtcggt

SEQ ID NO: 13593 - RNA, 91 nt, synthetic construct
  source 1..91: mol_type = other RNA
gtggttgctgtggctgagaaggcggagaggagccctgtgacattcttcgacacgccccccatgctctttgtgttcattgccctgggacggt

SEQ ID NO: 13594 - RNA, 92 nt, synthetic construct
  source 1..92: mol_type = other RNA
ggtggttgctgtggctgagaaggcggagaggagccctgtgacattcttcgacacgccccccatgctctttgtgttcattgccctgggacggt

SEQ ID NO: 13595 - RNA, 92 nt, synthetic construct
  source 1..92: mol_type = other RNA
ggtggttgctgtggctgagaaggcggagaggagccctgtgacattcttcgacacgccccccatgctctttgtgttcattgccctggggcggt

SEQ ID NO: 13596 - RNA, 92 nt, synthetic construct
  source 1..92: mol_type = other RNA
ggtggttgctgtggctgagaaggcggagaggagccctgtgacattcttcgacacgccccccatgctctttgtgttcattgccctgggtcggt

SEQ ID NO: 13597 - RNA, 92 nt, synthetic construct
  source 1..92: mol_type = other RNA
ggtggttgctgtggctgagaaggcggagaggagccctgtgacattcttcgacacgccccccatgctctttgtgttcattgccctgggccggt

SEQ ID NO: 13598 - RNA, 93 nt, synthetic construct
  source 1..93: mol_type = other RNA
tggtggttgctgtggctgagaaggcggagaggagccctgtgacattcttcgacacgccccccatgctctttgtgttcattgccctgggacggt

SEQ ID NO: 13599 - RNA, 93 nt, synthetic construct
  source 1..93: mol_type = other RNA
tggtggttgctgtggctgagaaggcggagaggagccctgtgacattcttcgacacgccccccatgctctttgtgttcattgccctgggccggt

SEQ ID NO: 13600 - RNA, 93 nt, synthetic construct
  source 1..93: mol_type = other RNA
tggtggttgctgtggctgagaaggcggagaggagccctgtgacattcttcgacacgccccccatgctctttgtgttcattgccctgggtcggt

SEQ ID NO: 13601 - RNA, 93 nt, synthetic construct
  source 1..93: mol_type = other RNA
tggtggttgctgtggctgagaaggcggagaggagccctgtgacattcttcgacacgccccccatgctctttgtgttcattgccctggggcggt

SEQ ID NO: 13602 - RNA, 94 nt, synthetic construct
  source 1..94: mol_type = other RNA
ctggtggttgctgtggctgagaaggcggagaggagccctgtgacattcttcgacacgccccccatgctctttgtgttcattgccctggggcggt

SEQ ID NO: 13603 - RNA, 94 nt, synthetic construct
  source 1..94: mol_type = other RNA
ctggtggttgctgtggctgagaaggcggagaggagccctgtgacattcttcgacacgccccccatgctctttgtgttcattgccctgggtcggt

SEQ ID NO: 13604 - RNA, 94 nt, synthetic construct
  source 1..94: mol_type = other RNA
ctggtggttgctgtggctgagaaggcggagaggagccctgtgacattcttcgacacgccccccatgctctttgtgttcattgccctgggccggt

SEQ ID NO: 13605 - RNA, 94 nt, synthetic construct
  source 1..94: mol_type = other RNA
ctggtggttgctgtggctgagaaggcggagaggagccctgtgacattcttcgacacgccccccatgctctttgtgttcattgccctgggacggt

SEQ ID NO: 13606 - RNA, 95 nt, synthetic construct
  source 1..95: mol_type = other RNA
cctggtggttgctgtggctgagaaggcggagaggagccctgtgacattcttcgacacgccccccatgctctttgtgttcattgccctgggtcggt

SEQ ID NO: 13607 - RNA, 95 nt, synthetic construct
  source 1..95: mol_type = other RNA
cctggtggttgctgtggctgagaaggcggagaggagccctgtgacattcttcgacacgccccccatgctctttgtgttcattgccctggggcggt

SEQ ID NO: 13608 - RNA, 95 nt, synthetic construct
  source 1..95: mol_type = other RNA
cctggtggttgctgtggctgagaaggcggagaggagccctgtgacattcttcgacacgccccccatgctctttgtgttcattgccctgggccggt

SEQ ID NO: 13609 - RNA, 95 nt, synthetic construct
  source 1..95: mol_type = other RNA
cctggtggttgctgtggctgagaaggcggagaggagccctgtgacattcttcgacacgccccccatgctctttgtgttcattgccctgggacggt

SEQ ID NO: 13610 - RNA, 96 nt, synthetic construct
  source 1..96: mol_type = other RNA
tcctggtggttgctgtggctgagaaggcggagaggagccctgtgacattcttcgacacgccccccatgctctttgtgttcattgccctgggacggt

SEQ ID NO: 13611 - RNA, 96 nt, synthetic construct
  source 1..96: mol_type = other RNA
tcctggtggttgctgtggctgagaaggcggagaggagccctgtgacattcttcgacacgccccccatgctctttgtgttcattgccctgggtcggt

SEQ ID NO: 13612 - RNA, 96 nt, synthetic construct
  source 1..96: mol_type = other RNA
tcctggtggttgctgtggctgagaaggcggagaggagccctgtgacattcttcgacacgccccccatgctctttgtgttcattgccctggggcggt

SEQ ID NO: 13613 - RNA, 96 nt, synthetic construct
  source 1..96: mol_type = other RNA
tcctggtggttgctgtggctgagaaggcggagaggagccctgtgacattcttcgacacgccccccatgctctttgtgttcattgccctgggccggt

SEQ ID NO: 13614 - RNA, 97 nt, synthetic construct
  source 1..97: mol_type = other RNA
atcctggtggttgctgtggctgagaaggcggagaggagccctgtgacattcttcgacacgccccccatgctctttgtgttcattgccctgggacggt

SEQ ID NO: 13615 - RNA, 97 nt, synthetic construct
  source 1..97: mol_type = other RNA
atcctggtggttgctgtggctgagaaggcggagaggagccctgtgacattcttcgacacgccccccatgctctttgtgttcattgccctggggcggt

SEQ ID NO: 13616 - RNA, 97 nt, synthetic construct
  source 1..97: mol_type = other RNA
atcctggtggttgctgtggctgagaaggcggagaggagccctgtgacattcttcgacacgccccccatgctctttgtgttcattgccctgggtcggt

SEQ ID NO: 13617 - RNA, 97 nt, synthetic construct
  source 1..97: mol_type = other RNA
atcctggtggttgctgtggctgagaaggcggagaggagccctgtgacattcttcgacacgccccccatgctctttgtgttcattgccctgggccggt

SEQ ID NO: 13618 - RNA, 98 nt, synthetic construct
  source 1..98: mol_type = other RNA
catcctggtggttgctgtggctgagaaggcggagaggagccctgtgacattcttcgacacgccccccatgctctttgtgttcattgccctgggccggt

SEQ ID NO: 13619 - RNA, 98 nt, synthetic construct
  source 1..98: mol_type = other RNA
catcctggtggttgctgtggctgagaaggcggagaggagccctgtgacattcttcgacacgccccccatgctctttgtgttcattgccctggggcggt

SEQ ID NO: 13620 - RNA, 98 nt, synthetic construct
  source 1..98: mol_type = other RNA
catcctggtggttgctgtggctgagaaggcggagaggagccctgtgacattcttcgacacgccccccatgctctttgtgttcattgccctgggacggt

SEQ ID NO: 13621 - RNA, 98 nt, synthetic construct
  source 1..98: mol_type = other RNA
catcctggtggttgctgtggctgagaaggcggagaggagccctgtgacattcttcgacacgccccccatgctctttgtgttcattgccctgggtcggt

SEQ ID NO: 13622 - RNA, 99 nt, synthetic construct
  source 1..99: mol_type = other RNA
tcatcctggtggttgctgtggctgagaaggcggagaggagccctgtgacattcttcgacacgccccccatgctctttgtgttcattgccctgggtcggt

SEQ ID NO: 13623 - RNA, 99 nt, synthetic construct
  source 1..99: mol_type = other RNA
tcatcctggtggttgctgtggctgagaaggcggagaggagccctgtgacattcttcgacacgccccccatgctctttgtgttcattgccctgggacggt

SEQ ID NO: 13624 - RNA, 99 nt, synthetic construct
  source 1..99: mol_type = other RNA
tcatcctggtggttgctgtggctgagaaggcggagaggagccctgtgacattcttcgacacgccccccatgctctttgtgttcattgccctggggcggt

SEQ ID NO: 13625 - RNA, 99 nt, synthetic construct
  source 1..99: mol_type = other RNA
tcatcctggtggttgctgtggctgagaaggcggagaggagccctgtgacattcttcgacacgccccccatgctctttgtgttcattgccctgggccggt

SEQ ID NO: 13626 - RNA, 100 nt, synthetic construct
  source 1..100: mol_type = other RNA
gtcatcctggtggttgctgtggctgagaaggcggagaggagccctgtgacattcttcgacacgccccccatgctctttgtgttcattgccctgggccggt

SEQ ID NO: 13627 - RNA, 100 nt, synthetic construct
  source 1..100: mol_type = other RNA
gtcatcctggtggttgctgtggctgagaaggcggagaggagccctgtgacattcttcgacacgccccccatgctctttgtgttcattgccctggggcggt

SEQ ID NO: 13628 - RNA, 100 nt, synthetic construct
  source 1..100: mol_type = other RNA
gtcatcctggtggttgctgtggctgagaaggcggagaggagccctgtgacattcttcgacacgccccccatgctctttgtgttcattgccctgggtcggt

SEQ ID NO: 13629 - RNA, 100 nt, synthetic construct
  source 1..100: mol_type = other RNA
gtcatcctggtggttgctgtggctgagaaggcggagaggagccctgtgacattcttcgacacgccccccatgctctttgtgttcattgccctgggacggt

SEQ ID NO: 13630 - RNA, 20 nt, synthetic construct
  source 1..20: mol_type = other RNA
tgtgttcattgccctgggtc

SEQ ID NO: 13631 - RNA, 20 nt, synthetic construct
  source 1..20: mol_type = other RNA
tgtgttcattgccctgggac

SEQ ID NO: 13632 - RNA, 20 nt, synthetic construct
  source 1..20: mol_type = other RNA
gttcattgccctgggacggt

SEQ ID NO: 13633 - RNA, 20 nt, synthetic construct
  source 1..20: mol_type = other RNA
tgtgttcattgccctggggc

SEQ ID NO: 13634 - RNA, 20 nt, synthetic construct
  source 1..20: mol_type = other RNA
gttcattgccctgggtcggt

SEQ ID NO: 13635 - RNA, 20 nt, synthetic construct
  source 1..20: mol_type = other RNA
gttcattgccctggggcggt

SEQ ID NO: 13636 - RNA, 16 nt, synthetic construct
  source 1..16: mol_type = other RNA
ttattctctggtcatc

SEQ ID NO: 13637 - RNA, 17 nt, synthetic construct
  source 1..17: mol_type = other RNA
tttattctctggtcatc

SEQ ID NO: 13638 - RNA, 18 nt, synthetic construct
  source 1..18: mol_type = other RNA
gtttattctctggtcatc

SEQ ID NO: 13639 - RNA, 19 nt, synthetic construct
  source 1..19: mol_type = other RNA
tgtttattctctggtcatc

SEQ ID NO: 13640 - RNA, 20 nt, synthetic construct
  source 1..20: mol_type = other RNA
atgtttattctctggtcatc

SEQ ID NO: 13641 - RNA, 21 nt, synthetic construct
  source 1..21: mol_type = other RNA
tatgtttattctctggtcatc

SEQ ID NO: 13642 - RNA, 22 nt, synthetic construct
  source 1..22: mol_type = other RNA
ttatgtttattctctggtcatc

SEQ ID NO: 13643-13649 - skipped (7 entries)

SEQ ID NO: 13650 - RNA, 10 nt, synthetic construct
  source 1..10: mol_type = other RNA
gaccagagaa

SEQ ID NO: 13651 - RNA, 11 nt, synthetic construct
  source 1..11: mol_type = other RNA
gaccagagaat

SEQ ID NO: 13652 - RNA, 12 nt, synthetic construct
  source 1..12: mol_type = other RNA
gaccagagaata

SEQ ID NO: 13653 - RNA, 13 nt, synthetic construct
  source 1..13: mol_type = other RNA
gaccagagaataa

SEQ ID NO: 13654 - RNA, 14 nt, synthetic construct
  source 1..14: mol_type = other RNA
gaccagagaataaa

SEQ ID NO: 13655 - RNA, 15 nt, synthetic construct
  source 1..15: mol_type = other RNA
gaccagagaataaac

SEQ ID NO: 13656 - RNA, 16 nt, synthetic construct
  source 1..16: mol_type = other RNA
gaccagagaataaaca

SEQ ID NO: 13657 - RNA, 17 nt, synthetic construct
  source 1..17: mol_type = other RNA
gaccagagaataaacat

SEQ ID NO: 13658 - RNA, 18 nt, synthetic construct
  source 1..18: mol_type = other RNA
gaccagagaataaacata

SEQ ID NO: 13659 - RNA, 19 nt, synthetic construct
  source 1..19: mol_type = other RNA
gaccagagaataaacataa

SEQ ID NO: 13660 - RNA, 95 nt, synthetic construct
  source 1..95: mol_type = other RNA
cggcccagggcaatgaacacaaagagcatggggggcgtgtcgaagaatgtcacagggctcctctccgccttctcagccacagcaaccacgaggat

SEQ ID NO: 13661 - RNA, 95 nt, synthetic construct
  source 1..95: mol_type = other RNA
cggcccagggcaatgaacacaaagagcatggggggcgtgtcgaagaatgtcacagggctcctctccgccttctcagccacagcaaccactaagat

SEQ ID NO: 13662 - RNA, 95 nt, synthetic construct
  source 1..95: mol_type = other RNA
cggcccagggcaatgaacacaaagagcatggggggcgtgtcgaagaatgtcacagggctcctctccgccttctcagccacagcaaccactaggat

SEQ ID NO: 13663 - RNA, 95 nt, synthetic construct
  source 1..95: mol_type = other RNA
cggcccagggcaatgaacacaaagagcatggggggcgtgtcgaagaatgtcacagggctcctctccgccttctcagccacagcaaccaccaggat

SEQ ID NO: 13664 - RNA, 95 nt, synthetic construct
  source 1..95: mol_type = other RNA
cggcccagggcaatgaacacaaagagcatggggggcgtgtcgaagaatgtcacagggctcctctccgccttctcagccacagcaaccacaaggat

SEQ ID NO: 13665 - RNA, 96 nt, synthetic construct
  source 1..96: mol_type = other RNA
ccggcccagggcaatgaacacaaagagcatggggggcgtgtcgaagaatgtcacagggctcctctccgccttctcagccacagcaaccaccaggat

SEQ ID NO: 13666 - RNA, 96 nt, synthetic construct
  source 1..96: mol_type = other RNA
ccggcccagggcaatgaacacaaagagcatggggggcgtgtcgaagaatgtcacagggctcctctccgccttctcagccacagcaaccactaagat

SEQ ID NO: 13667 - RNA, 96 nt, synthetic construct
  source 1..96: mol_type = other RNA
ccggcccagggcaatgaacacaaagagcatggggggcgtgtcgaagaatgtcacagggctcctctccgccttctcagccacagcaaccactaggat

SEQ ID NO: 13668 - RNA, 96 nt, synthetic construct
  source 1..96: mol_type = other RNA
ccggcccagggcaatgaacacaaagagcatggggggcgtgtcgaagaatgtcacagggctcctctccgccttctcagccacagcaaccacgaggat

SEQ ID NO: 13669 - RNA, 96 nt, synthetic construct
  source 1..96: mol_type = other RNA
ccggcccagggcaatgaacacaaagagcatggggggcgtgtcgaagaatgtcacagggctcctctccgccttctcagccacagcaaccacaaggat

SEQ ID NO: 13670 - RNA, 97 nt, synthetic construct
  source 1..97: mol_type = other RNA
accggcccagggcaatgaacacaaagagcatggggggcgtgtcgaagaatgtcacagggctcctctccgccttctcagccacagcaaccactaggat

SEQ ID NO: 13671 - RNA, 97 nt, synthetic construct
  source 1..97: mol_type = other RNA
accggcccagggcaatgaacacaaagagcatggggggcgtgtcgaagaatgtcacagggctcctctccgccttctcagccacagcaaccacaaggat

SEQ ID NO: 13672 - RNA, 97 nt, synthetic construct
  source 1..97: mol_type = other RNA
accggcccagggcaatgaacacaaagagcatggggggcgtgtcgaagaatgtcacagggctcctctccgccttctcagccacagcaaccaccaggat

SEQ ID NO: 13673 - RNA, 97 nt, synthetic construct
  source 1..97: mol_type = other RNA
accggcccagggcaatgaacacaaagagcatggggggcgtgtcgaagaatgtcacagggctcctctccgccttctcagccacagcaaccacgaggat

SEQ ID NO: 13674 - RNA, 97 nt, synthetic construct
  source 1..97: mol_type = other RNA
accggcccagggcaatgaacacaaagagcatggggggcgtgtcgaagaatgtcacagggctcctctccgccttctcagccacagcaaccactaagat

SEQ ID NO: 13675 - RNA, 98 nt, synthetic construct
  source 1..98: mol_type = other RNA
caccggcccagggcaatgaacacaaagagcatggggggcgtgtcgaagaatgtcacagggctcctctccgccttctcagccacagcaaccactaggat

SEQ ID NO: 13676 - RNA, 98 nt, synthetic construct
  source 1..98: mol_type = other RNA
caccggcccagggcaatgaacacaaagagcatggggggcgtgtcgaagaatgtcacagggctcctctccgccttctcagccacagcaaccactaagat

SEQ ID NO: 13677 - RNA, 98 nt, synthetic construct
  source 1..98: mol_type = other RNA
caccggcccagggcaatgaacacaaagagcatggggggcgtgtcgaagaatgtcacagggctcctctccgccttctcagccacagcaaccacaaggat

SEQ ID NO: 13678 - RNA, 98 nt, synthetic construct
  source 1..98: mol_type = other RNA
caccggcccagggcaatgaacacaaagagcatggggggcgtgtcgaagaatgtcacagggctcctctccgccttctcagccacagcaaccacgaggat

SEQ ID NO: 13679 - RNA, 98 nt, synthetic construct
  source 1..98: mol_type = other RNA
caccggcccagggcaatgaacacaaagagcatggggggcgtgtcgaagaatgtcacagggctcctctccgccttctcagccacagcaaccaccaggat

SEQ ID NO: 13680 - RNA, 99 nt, synthetic construct
  source 1..99: mol_type = other RNA
ccaccggcccagggcaatgaacacaaagagcatggggggcgtgtcgaagaatgtcacagggctcctctccgccttctcagccacagcaaccactaggat

SEQ ID NO: 13681 - RNA, 99 nt, synthetic construct
  source 1..99: mol_type = other RNA
ccaccggcccagggcaatgaacacaaagagcatggggggcgtgtcgaagaatgtcacagggctcctctccgccttctcagccacagcaaccacgaggat

SEQ ID NO: 13682 - RNA, 99 nt, synthetic construct
  source 1..99: mol_type = other RNA
ccaccggcccagggcaatgaacacaaagagcatggggggcgtgtcgaagaatgtcacagggctcctctccgccttctcagccacagcaaccactaagat

SEQ ID NO: 13683 - RNA, 99 nt, synthetic construct
  source 1..99: mol_type = other RNA
ccaccggcccagggcaatgaacacaaagagcatggggggcgtgtcgaagaatgtcacagggctcctctccgccttctcagccacagcaaccaccaggat

SEQ ID NO: 13684 - RNA, 99 nt, synthetic construct
  source 1..99: mol_type = other RNA
ccaccggcccagggcaatgaacacaaagagcatggggggcgtgtcgaagaatgtcacagggctcctctccgccttctcagccacagcaaccacaaggat

SEQ ID NO: 13685 - RNA, 100 nt, synthetic construct
  source 1..100: mol_type = other RNA
gccaccggcccagggcaatgaacacaaagagcatggggggcgtgtcgaagaatgtcacagggctcctctccgccttctcagccacagcaaccacgaggat

SEQ ID NO: 13686 - RNA, 100 nt, synthetic construct
  source 1..100: mol_type = other RNA
gccaccggcccagggcaatgaacacaaagagcatggggggcgtgtcgaagaatgtcacagggctcctctccgccttctcagccacagcaaccactaagat

SEQ ID NO: 13687 - RNA, 100 nt, synthetic construct
  source 1..100: mol_type = other RNA
gccaccggcccagggcaatgaacacaaagagcatggggggcgtgtcgaagaatgtcacagggctcctctccgccttctcagccacagcaaccacaaggat

SEQ ID NO: 13688 - RNA, 100 nt, synthetic construct
  source 1..100: mol_type = other RNA
gccaccggcccagggcaatgaacacaaagagcatggggggcgtgtcgaagaatgtcacagggctcctctccgccttctcagccacagcaaccactaggat

SEQ ID NO: 13689 - RNA, 100 nt, synthetic construct
  source 1..100: mol_type = other RNA
gccaccggcccagggcaatgaacacaaagagcatggggggcgtgtcgaagaatgtcacagggctcctctccgccttctcagccacagcaaccaccaggat

SEQ ID NO: 13690 - RNA, 16 nt, synthetic construct
  source 1..16: mol_type = other RNA
ttctctggtcatcctg

SEQ ID NO: 13691 - RNA, 17 nt, synthetic construct
  source 1..17: mol_type = other RNA
attctctggtcatcctg

SEQ ID NO: 13692 - RNA, 18 nt, synthetic construct
  source 1..18: mol_type = other RNA
tattctctggtcatcctg

SEQ ID NO: 13693 - RNA, 19 nt, synthetic construct
  source 1..19: mol_type = other RNA
ttattctctggtcatcctg

SEQ ID NO: 13694 - RNA, 20 nt, synthetic construct
  source 1..20: mol_type = other RNA
tttattctctggtcatcctg

SEQ ID NO: 13695 - RNA, 21 nt, synthetic construct
  source 1..21: mol_type = other RNA
gtttattctctggtcatcctg

SEQ ID NO: 13696 - RNA, 22 nt, synthetic construct
  source 1..22: mol_type = other RNA
tgtttattctctggtcatcctg

SEQ ID NO: 13697-13703 - skipped (7 entries)

SEQ ID NO: 13704 - RNA, 10 nt, synthetic construct
  source 1..10: mol_type = other RNA
gatgaccaga

SEQ ID NO: 13705 - RNA, 11 nt, synthetic construct
  source 1..11: mol_type = other RNA
gatgaccagag

SEQ ID NO: 13706 - RNA, 12 nt, synthetic construct
  source 1..12: mol_type = other RNA
gatgaccagaga

SEQ ID NO: 13707 - RNA, 13 nt, synthetic construct
  source 1..13: mol_type = other RNA
gatgaccagagaa

SEQ ID NO: 13708 - RNA, 14 nt, synthetic construct
  source 1..14: mol_type = other RNA
gatgaccagagaat

SEQ ID NO: 13709 - RNA, 15 nt, synthetic construct
  source 1..15: mol_type = other RNA
gatgaccagagaata

SEQ ID NO: 13710 - RNA, 16 nt, synthetic construct
  source 1..16: mol_type = other RNA
gatgaccagagaataa

SEQ ID NO: 13711 - RNA, 17 nt, synthetic construct
  source 1..17: mol_type = other RNA
gatgaccagagaataaa

SEQ ID NO: 13712 - RNA, 18 nt, synthetic construct
  source 1..18: mol_type = other RNA
gatgaccagagaataaac

SEQ ID NO: 13713 - RNA, 19 nt, synthetic construct
  source 1..19: mol_type = other RNA
gatgaccagagaataaaca

SEQ ID NO: 13714 - RNA, 92 nt, synthetic construct
  source 1..92: mol_type = other RNA
cggcccagggcaatgaacacaaagagcatggggggcgtgtcgaagaatgtcacagggctcctctccgccttctcagccacagcaactaccag

SEQ ID NO: 13715 - RNA, 92 nt, synthetic construct
  source 1..92: mol_type = other RNA
cggcccagggcaatgaacacaaagagcatggggggcgtgtcgaagaatgtcacagggctcctctccgccttctcagccacagcaacaaccag

SEQ ID NO: 13716 - RNA, 92 nt, synthetic construct
  source 1..92: mol_type = other RNA
cggcccagggcaatgaacacaaagagcatggggggcgtgtcgaagaatgtcacagggctcctctccgccttctcagccacagcaaccaccag

SEQ ID NO: 13717 - RNA, 92 nt, synthetic construct
  source 1..92: mol_type = other RNA
cggcccagggcaatgaacacaaagagcatggggggcgtgtcgaagaatgtcacagggctcctctccgccttctcagccacagcaacgaccag

SEQ ID NO: 13718 - RNA, 93 nt, synthetic construct
  source 1..93: mol_type = other RNA
ccggcccagggcaatgaacacaaagagcatggggggcgtgtcgaagaatgtcacagggctcctctccgccttctcagccacagcaaccaccag

SEQ ID NO: 13719 - RNA, 93 nt, synthetic construct
  source 1..93: mol_type = other RNA
ccggcccagggcaatgaacacaaagagcatggggggcgtgtcgaagaatgtcacagggctcctctccgccttctcagccacagcaacgaccag

SEQ ID NO: 13720 - RNA, 93 nt, synthetic construct
  source 1..93: mol_type = other RNA
ccggcccagggcaatgaacacaaagagcatggggggcgtgtcgaagaatgtcacagggctcctctccgccttctcagccacagcaacaaccag

SEQ ID NO: 13721 - RNA, 93 nt, synthetic construct
  source 1..93: mol_type = other RNA
ccggcccagggcaatgaacacaaagagcatggggggcgtgtcgaagaatgtcacagggctcctctccgccttctcagccacagcaactaccag

SEQ ID NO: 13722 - RNA, 94 nt, synthetic construct
  source 1..94: mol_type = other RNA
accggcccagggcaatgaacacaaagagcatggggggcgtgtcgaagaatgtcacagggctcctctccgccttctcagccacagcaactaccag

SEQ ID NO: 13723 - RNA, 94 nt, synthetic construct
  source 1..94: mol_type = other RNA
accggcccagggcaatgaacacaaagagcatggggggcgtgtcgaagaatgtcacagggctcctctccgccttctcagccacagcaacgaccag

SEQ ID NO: 13724 - RNA, 94 nt, synthetic construct
  source 1..94: mol_type = other RNA
accggcccagggcaatgaacacaaagagcatggggggcgtgtcgaagaatgtcacagggctcctctccgccttctcagccacagcaaccaccag

SEQ ID NO: 13725 - RNA, 94 nt, synthetic construct
  source 1..94: mol_type = other RNA
accggcccagggcaatgaacacaaagagcatggggggcgtgtcgaagaatgtcacagggctcctctccgccttctcagccacagcaacaaccag

SEQ ID NO: 13726 - RNA, 95 nt, synthetic construct
  source 1..95: mol_type = other RNA
caccggcccagggcaatgaacacaaagagcatggggggcgtgtcgaagaatgtcacagggctcctctccgccttctcagccacagcaacgaccag

SEQ ID NO: 13727 - RNA, 95 nt, synthetic construct
  source 1..95: mol_type = other RNA
caccggcccagggcaatgaacacaaagagcatggggggcgtgtcgaagaatgtcacagggctcctctccgccttctcagccacagcaaccaccag

SEQ ID NO: 13728 - RNA, 95 nt, synthetic construct
  source 1..95: mol_type = other RNA
caccggcccagggcaatgaacacaaagagcatggggggcgtgtcgaagaatgtcacagggctcctctccgccttctcagccacagcaacaaccag

SEQ ID NO: 13729 - RNA, 95 nt, synthetic construct
  source 1..95: mol_type = other RNA
caccggcccagggcaatgaacacaaagagcatggggggcgtgtcgaagaatgtcacagggctcctctccgccttctcagccacagcaactaccag

SEQ ID NO: 13730 - RNA, 96 nt, synthetic construct
  source 1..96: mol_type = other RNA
ccaccggcccagggcaatgaacacaaagagcatggggggcgtgtcgaagaatgtcacagggctcctctccgccttctcagccacagcaacgaccag

SEQ ID NO: 13731 - RNA, 96 nt, synthetic construct
  source 1..96: mol_type = other RNA
ccaccggcccagggcaatgaacacaaagagcatggggggcgtgtcgaagaatgtcacagggctcctctccgccttctcagccacagcaacaaccag

SEQ ID NO: 13732 - RNA, 96 nt, synthetic construct
  source 1..96: mol_type = other RNA
ccaccggcccagggcaatgaacacaaagagcatggggggcgtgtcgaagaatgtcacagggctcctctccgccttctcagccacagcaaccaccag

SEQ ID NO: 13733 - RNA, 96 nt, synthetic construct
  source 1..96: mol_type = other RNA
ccaccggcccagggcaatgaacacaaagagcatggggggcgtgtcgaagaatgtcacagggctcctctccgccttctcagccacagcaactaccag

SEQ ID NO: 13734 - RNA, 97 nt, synthetic construct
  source 1..97: mol_type = other RNA
gccaccggcccagggcaatgaacacaaagagcatggggggcgtgtcgaagaatgtcacagggctcctctccgccttctcagccacagcaacaaccag

SEQ ID NO: 13735 - RNA, 97 nt, synthetic construct
  source 1..97: mol_type = other RNA
gccaccggcccagggcaatgaacacaaagagcatggggggcgtgtcgaagaatgtcacagggctcctctccgccttctcagccacagcaactaccag

SEQ ID NO: 13736 - RNA, 97 nt, synthetic construct
  source 1..97: mol_type = other RNA
gccaccggcccagggcaatgaacacaaagagcatggggggcgtgtcgaagaatgtcacagggctcctctccgccttctcagccacagcaaccaccag

SEQ ID NO: 13737 - RNA, 97 nt, synthetic construct
  source 1..97: mol_type = other RNA
gccaccggcccagggcaatgaacacaaagagcatggggggcgtgtcgaagaatgtcacagggctcctctccgccttctcagccacagcaacgaccag

SEQ ID NO: 13738 - RNA, 98 nt, synthetic construct
  source 1..98: mol_type = other RNA
agccaccggcccagggcaatgaacacaaagagcatggggggcgtgtcgaagaatgtcacagggctcctctccgccttctcagccacagcaacaaccag

SEQ ID NO: 13739 - RNA, 98 nt, synthetic construct
  source 1..98: mol_type = other RNA
agccaccggcccagggcaatgaacacaaagagcatggggggcgtgtcgaagaatgtcacagggctcctctccgccttctcagccacagcaactaccag

SEQ ID NO: 13740 - RNA, 98 nt, synthetic construct
  source 1..98: mol_type = other RNA
agccaccggcccagggcaatgaacacaaagagcatggggggcgtgtcgaagaatgtcacagggctcctctccgccttctcagccacagcaaccaccag

SEQ ID NO: 13741 - RNA, 98 nt, synthetic construct
  source 1..98: mol_type = other RNA
agccaccggcccagggcaatgaacacaaagagcatggggggcgtgtcgaagaatgtcacagggctcctctccgccttctcagccacagcaacgaccag

SEQ ID NO: 13742 - RNA, 99 nt, synthetic construct
  source 1..99: mol_type = other RNA
cagccaccggcccagggcaatgaacacaaagagcatggggggcgtgtcgaagaatgtcacagggctcctctccgccttctcagccacagcaactaccag

SEQ ID NO: 13743 - RNA, 99 nt, synthetic construct
  source 1..99: mol_type = other RNA
cagccaccggcccagggcaatgaacacaaagagcatggggggcgtgtcgaagaatgtcacagggctcctctccgccttctcagccacagcaaccaccag

SEQ ID NO: 13744 - RNA, 99 nt, synthetic construct
  source 1..99: mol_type = other RNA
cagccaccggcccagggcaatgaacacaaagagcatggggggcgtgtcgaagaatgtcacagggctcctctccgccttctcagccacagcaacgaccag

SEQ ID NO: 13745 - RNA, 99 nt, synthetic construct
  source 1..99: mol_type = other RNA
cagccaccggcccagggcaatgaacacaaagagcatggggggcgtgtcgaagaatgtcacagggctcctctccgccttctcagccacagcaacaaccag

SEQ ID NO: 13746 - RNA, 100 nt, synthetic construct
  source 1..100: mol_type = other RNA
ccagccaccggcccagggcaatgaacacaaagagcatggggggcgtgtcgaagaatgtcacagggctcctctccgccttctcagccacagcaacgaccag

SEQ ID NO: 13747 - RNA, 100 nt, synthetic construct
  source 1..100: mol_type = other RNA
ccagccaccggcccagggcaatgaacacaaagagcatggggggcgtgtcgaagaatgtcacagggctcctctccgccttctcagccacagcaacaaccag

SEQ ID NO: 13748 - RNA, 100 nt, synthetic construct
  source 1..100: mol_type = other RNA
ccagccaccggcccagggcaatgaacacaaagagcatggggggcgtgtcgaagaatgtcacagggctcctctccgccttctcagccacagcaactaccag

SEQ ID NO: 13749 - RNA, 100 nt, synthetic construct
  source 1..100: mol_type = other RNA
ccagccaccggcccagggcaatgaacacaaagagcatggggggcgtgtcgaagaatgtcacagggctcctctccgccttctcagccacagcaaccaccag

SEQ ID NO: 13750 - RNA, 20 nt, synthetic construct
  source 1..20: mol_type = other RNA
ttctcagccacagcaactac

SEQ ID NO: 13751 - RNA, 16 nt, synthetic construct
  source 1..16: mol_type = other RNA
catcctggtggttgct

SEQ ID NO: 13752 - RNA, 17 nt, synthetic construct
  source 1..17: mol_type = other RNA
tcatcctggtggttgct

SEQ ID NO: 13753 - RNA, 18 nt, synthetic construct
  source 1..18: mol_type = other RNA
gtcatcctggtggttgct

SEQ ID NO: 13754 - RNA, 19 nt, synthetic construct
  source 1..19: mol_type = other RNA
ggtcatcctggtggttgct

SEQ ID NO: 13755 - RNA, 20 nt, synthetic construct
  source 1..20: mol_type = other RNA
tggtcatcctggtggttgct

SEQ ID NO: 13756 - RNA, 21 nt, synthetic construct
  source 1..21: mol_type = other RNA
ctggtcatcctggtggttgct

SEQ ID NO: 13757 - RNA, 22 nt, synthetic construct
  source 1..22: mol_type = other RNA
tctggtcatcctggtggttgct

SEQ ID NO: 13758-13763 - skipped (6 entries)

SEQ ID NO: 13764 - RNA, 10 nt, synthetic construct
  source 1..10: mol_type = other RNA
aaccaccagg

SEQ ID NO: 13765 - RNA, 11 nt, synthetic construct
  source 1..11: mol_type = other RNA
aaccaccagga

SEQ ID NO: 13766 - RNA, 12 nt, synthetic construct
  source 1..12: mol_type = other RNA
aaccaccaggat

SEQ ID NO: 13767 - RNA, 13 nt, synthetic construct
  source 1..13: mol_type = other RNA
aaccaccaggatg

SEQ ID NO: 13768 - RNA, 14 nt, synthetic construct
  source 1..14: mol_type = other RNA
aaccaccaggatga

SEQ ID NO: 13769 - RNA, 15 nt, synthetic construct
  source 1..15: mol_type = other RNA
aaccaccaggatgac

SEQ ID NO: 13770 - RNA, 16 nt, synthetic construct
  source 1..16: mol_type = other RNA
aaccaccaggatgacc

SEQ ID NO: 13771 - RNA, 17 nt, synthetic construct
  source 1..17: mol_type = other RNA
aaccaccaggatgacca

SEQ ID NO: 13772 - RNA, 18 nt, synthetic construct
  source 1..18: mol_type = other RNA
aaccaccaggatgaccag

SEQ ID NO: 13773 - RNA, 19 nt, synthetic construct
  source 1..19: mol_type = other RNA
aaccaccaggatgaccaga

SEQ ID NO: 13774 - RNA, 83 nt, synthetic construct
  source 1..83: mol_type = other RNA
cggcccagggcaatgaacacaaagagcatggggggcgtgtcgaagaatgtcacagggctcctctccgccttctcagctacagc

SEQ ID NO: 13775 - RNA, 83 nt, synthetic construct
  source 1..83: mol_type = other RNA
cggcccagggcaatgaacacaaagagcatggggggcgtgtcgaagaatgtcacagggctcctctccgccttctcagcgacagc

SEQ ID NO: 13776 - RNA, 83 nt, synthetic construct
  source 1..83: mol_type = other RNA
cggcccagggcaatgaacacaaagagcatggggggcgtgtcgaagaatgtcacagggctcctctccgccttctcagcaacagc

SEQ ID NO: 13777 - RNA, 83 nt, synthetic construct
  source 1..83: mol_type = other RNA
cggcccagggcaatgaacacaaagagcatggggggcgtgtcgaagaatgtcacagggctcctctccgccttctcagccacagc

SEQ ID NO: 13778 - RNA, 84 nt, synthetic construct
  source 1..84: mol_type = other RNA
ccggcccagggcaatgaacacaaagagcatggggggcgtgtcgaagaatgtcacagggctcctctccgccttctcagcgacagc

SEQ ID NO: 13779 - RNA, 84 nt, synthetic construct
  source 1..84: mol_type = other RNA
ccggcccagggcaatgaacacaaagagcatggggggcgtgtcgaagaatgtcacagggctcctctccgccttctcagcaacagc

SEQ ID NO: 13780 - RNA, 84 nt, synthetic construct
  source 1..84: mol_type = other RNA
ccggcccagggcaatgaacacaaagagcatggggggcgtgtcgaagaatgtcacagggctcctctccgccttctcagccacagc

SEQ ID NO: 13781 - RNA, 84 nt, synthetic construct
  source 1..84: mol_type = other RNA
ccggcccagggcaatgaacacaaagagcatggggggcgtgtcgaagaatgtcacagggctcctctccgccttctcagctacagc

SEQ ID NO: 13782 - RNA, 85 nt, synthetic construct
  source 1..85: mol_type = other RNA
accggcccagggcaatgaacacaaagagcatggggggcgtgtcgaagaatgtcacagggctcctctccgccttctcagcgacagc

SEQ ID NO: 13783 - RNA, 85 nt, synthetic construct
  source 1..85: mol_type = other RNA
accggcccagggcaatgaacacaaagagcatggggggcgtgtcgaagaatgtcacagggctcctctccgccttctcagctacagc

SEQ ID NO: 13784 - RNA, 85 nt, synthetic construct
  source 1..85: mol_type = other RNA
accggcccagggcaatgaacacaaagagcatggggggcgtgtcgaagaatgtcacagggctcctctccgccttctcagcaacagc

SEQ ID NO: 13785 - RNA, 85 nt, synthetic construct
  source 1..85: mol_type = other RNA
accggcccagggcaatgaacacaaagagcatggggggcgtgtcgaagaatgtcacagggctcctctccgccttctcagccacagc

SEQ ID NO: 13786 - RNA, 86 nt, synthetic construct
  source 1..86: mol_type = other RNA
caccggcccagggcaatgaacacaaagagcatggggggcgtgtcgaagaatgtcacagggctcctctccgccttctcagcgacagc

SEQ ID NO: 13787 - RNA, 86 nt, synthetic construct
  source 1..86: mol_type = other RNA
caccggcccagggcaatgaacacaaagagcatggggggcgtgtcgaagaatgtcacagggctcctctccgccttctcagccacagc

SEQ ID NO: 13788 - RNA, 86 nt, synthetic construct
  source 1..86: mol_type = other RNA
caccggcccagggcaatgaacacaaagagcatggggggcgtgtcgaagaatgtcacagggctcctctccgccttctcagcaacagc

SEQ ID NO: 13789 - RNA, 86 nt, synthetic construct
  source 1..86: mol_type = other RNA
caccggcccagggcaatgaacacaaagagcatggggggcgtgtcgaagaatgtcacagggctcctctccgccttctcagctacagc

SEQ ID NO: 13790 - RNA, 87 nt, synthetic construct
  source 1..87: mol_type = other RNA
ccaccggcccagggcaatgaacacaaagagcatggggggcgtgtcgaagaatgtcacagggctcctctccgccttctcagcaacagc

SEQ ID NO: 13791 - RNA, 87 nt, synthetic construct
  source 1..87: mol_type = other RNA
ccaccggcccagggcaatgaacacaaagagcatggggggcgtgtcgaagaatgtcacagggctcctctccgccttctcagcgacagc

SEQ ID NO: 13792 - RNA, 87 nt, synthetic construct
  source 1..87: mol_type = other RNA
ccaccggcccagggcaatgaacacaaagagcatggggggcgtgtcgaagaatgtcacagggctcctctccgccttctcagctacagc

SEQ ID NO: 13793 - RNA, 87 nt, synthetic construct
  source 1..87: mol_type = other RNA
ccaccggcccagggcaatgaacacaaagagcatggggggcgtgtcgaagaatgtcacagggctcctctccgccttctcagccacagc

SEQ ID NO: 13794 - RNA, 88 nt, synthetic construct
  source 1..88: mol_type = other RNA
gccaccggcccagggcaatgaacacaaagagcatggggggcgtgtcgaagaatgtcacagggctcctctccgccttctcagcaacagc

SEQ ID NO: 13795 - RNA, 88 nt, synthetic construct
  source 1..88: mol_type = other RNA
gccaccggcccagggcaatgaacacaaagagcatggggggcgtgtcgaagaatgtcacagggctcctctccgccttctcagcgacagc

SEQ ID NO: 13796 - RNA, 88 nt, synthetic construct
  source 1..88: mol_type = other RNA
gccaccggcccagggcaatgaacacaaagagcatggggggcgtgtcgaagaatgtcacagggctcctctccgccttctcagccacagc

SEQ ID NO: 13797 - RNA, 88 nt, synthetic construct
  source 1..88: mol_type = other RNA
gccaccggcccagggcaatgaacacaaagagcatggggggcgtgtcgaagaatgtcacagggctcctctccgccttctcagctacagc

SEQ ID NO: 13798 - RNA, 89 nt, synthetic construct
  source 1..89: mol_type = other RNA
agccaccggcccagggcaatgaacacaaagagcatggggggcgtgtcgaagaatgtcacagggctcctctccgccttctcagcaacagc

SEQ ID NO: 13799 - RNA, 89 nt, synthetic construct
  source 1..89: mol_type = other RNA
agccaccggcccagggcaatgaacacaaagagcatggggggcgtgtcgaagaatgtcacagggctcctctccgccttctcagctacagc

SEQ ID NO: 13800 - RNA, 89 nt, synthetic construct
  source 1..89: mol_type = other RNA
agccaccggcccagggcaatgaacacaaagagcatggggggcgtgtcgaagaatgtcacagggctcctctccgccttctcagccacagc

SEQ ID NO: 13801 - RNA, 89 nt, synthetic construct
  source 1..89: mol_type = other RNA
agccaccggcccagggcaatgaacacaaagagcatggggggcgtgtcgaagaatgtcacagggctcctctccgccttctcagcgacagc

SEQ ID NO: 13802 - RNA, 90 nt, synthetic construct
  source 1..90: mol_type = other RNA
cagccaccggcccagggcaatgaacacaaagagcatggggggcgtgtcgaagaatgtcacagggctcctctccgccttctcagcaacagc

SEQ ID NO: 13803 - RNA, 90 nt, synthetic construct
  source 1..90: mol_type = other RNA
cagccaccggcccagggcaatgaacacaaagagcatggggggcgtgtcgaagaatgtcacagggctcctctccgccttctcagctacagc

SEQ ID NO: 13804 - RNA, 90 nt, synthetic construct
  source 1..90: mol_type = other RNA
cagccaccggcccagggcaatgaacacaaagagcatggggggcgtgtcgaagaatgtcacagggctcctctccgccttctcagcgacagc

SEQ ID NO: 13805 - RNA, 90 nt, synthetic construct
  source 1..90: mol_type = other RNA
cagccaccggcccagggcaatgaacacaaagagcatggggggcgtgtcgaagaatgtcacagggctcctctccgccttctcagccacagc

SEQ ID NO: 13806 - RNA, 91 nt, synthetic construct
  source 1..91: mol_type = other RNA
ccagccaccggcccagggcaatgaacacaaagagcatggggggcgtgtcgaagaatgtcacagggctcctctccgccttctcagctacagc

SEQ ID NO: 13807 - RNA, 91 nt, synthetic construct
  source 1..91: mol_type = other RNA
ccagccaccggcccagggcaatgaacacaaagagcatggggggcgtgtcgaagaatgtcacagggctcctctccgccttctcagccacagc

SEQ ID NO: 13808 - RNA, 91 nt, synthetic construct
  source 1..91: mol_type = other RNA
ccagccaccggcccagggcaatgaacacaaagagcatggggggcgtgtcgaagaatgtcacagggctcctctccgccttctcagcgacagc

SEQ ID NO: 13809 - RNA, 91 nt, synthetic construct
  source 1..91: mol_type = other RNA
ccagccaccggcccagggcaatgaacacaaagagcatggggggcgtgtcgaagaatgtcacagggctcctctccgccttctcagcaacagc

SEQ ID NO: 13810 - RNA, 92 nt, synthetic construct
  source 1..92: mol_type = other RNA
tccagccaccggcccagggcaatgaacacaaagagcatggggggcgtgtcgaagaatgtcacagggctcctctccgccttctcagctacagc

SEQ ID NO: 13811 - RNA, 92 nt, synthetic construct
  source 1..92: mol_type = other RNA
tccagccaccggcccagggcaatgaacacaaagagcatggggggcgtgtcgaagaatgtcacagggctcctctccgccttctcagcaacagc

SEQ ID NO: 13812 - RNA, 92 nt, synthetic construct
  source 1..92: mol_type = other RNA
tccagccaccggcccagggcaatgaacacaaagagcatggggggcgtgtcgaagaatgtcacagggctcctctccgccttctcagcgacagc

SEQ ID NO: 13813 - RNA, 92 nt, synthetic construct
  source 1..92: mol_type = other RNA
tccagccaccggcccagggcaatgaacacaaagagcatggggggcgtgtcgaagaatgtcacagggctcctctccgccttctcagccacagc

SEQ ID NO: 13814 - RNA, 93 nt, synthetic construct
  source 1..93: mol_type = other RNA
ttccagccaccggcccagggcaatgaacacaaagagcatggggggcgtgtcgaagaatgtcacagggctcctctccgccttctcagcgacagc

SEQ ID NO: 13815 - RNA, 93 nt, synthetic construct
  source 1..93: mol_type = other RNA
ttccagccaccggcccagggcaatgaacacaaagagcatggggggcgtgtcgaagaatgtcacagggctcctctccgccttctcagcaacagc

SEQ ID NO: 13816 - RNA, 93 nt, synthetic construct
  source 1..93: mol_type = other RNA
ttccagccaccggcccagggcaatgaacacaaagagcatggggggcgtgtcgaagaatgtcacagggctcctctccgccttctcagctacagc

SEQ ID NO: 13817 - RNA, 93 nt, synthetic construct
  source 1..93: mol_type = other RNA
ttccagccaccggcccagggcaatgaacacaaagagcatggggggcgtgtcgaagaatgtcacagggctcctctccgccttctcagccacagc

SEQ ID NO: 13818 - RNA, 94 nt, synthetic construct
  source 1..94: mol_type = other RNA
gttccagccaccggcccagggcaatgaacacaaagagcatggggggcgtgtcgaagaatgtcacagggctcctctccgccttctcagctacagc

SEQ ID NO: 13819 - RNA, 94 nt, synthetic construct
  source 1..94: mol_type = other RNA
gttccagccaccggcccagggcaatgaacacaaagagcatggggggcgtgtcgaagaatgtcacagggctcctctccgccttctcagcaacagc

SEQ ID NO: 13820 - RNA, 94 nt, synthetic construct
  source 1..94: mol_type = other RNA
gttccagccaccggcccagggcaatgaacacaaagagcatggggggcgtgtcgaagaatgtcacagggctcctctccgccttctcagccacagc

SEQ ID NO: 13821 - RNA, 94 nt, synthetic construct
  source 1..94: mol_type = other RNA
gttccagccaccggcccagggcaatgaacacaaagagcatggggggcgtgtcgaagaatgtcacagggctcctctccgccttctcagcgacagc

SEQ ID NO: 13822 - RNA, 95 nt, synthetic construct
  source 1..95: mol_type = other RNA
tgttccagccaccggcccagggcaatgaacacaaagagcatggggggcgtgtcgaagaatgtcacagggctcctctccgccttctcagcgacagc

SEQ ID NO: 13823 - RNA, 95 nt, synthetic construct
  source 1..95: mol_type = other RNA
tgttccagccaccggcccagggcaatgaacacaaagagcatggggggcgtgtcgaagaatgtcacagggctcctctccgccttctcagctacagc

SEQ ID NO: 13824 - RNA, 95 nt, synthetic construct
  source 1..95: mol_type = other RNA
tgttccagccaccggcccagggcaatgaacacaaagagcatggggggcgtgtcgaagaatgtcacagggctcctctccgccttctcagccacagc

SEQ ID NO: 13825 - RNA, 95 nt, synthetic construct
  source 1..95: mol_type = other RNA
tgttccagccaccggcccagggcaatgaacacaaagagcatggggggcgtgtcgaagaatgtcacagggctcctctccgccttctcagcaacagc

SEQ ID NO: 13826 - RNA, 96 nt, synthetic construct
  source 1..96: mol_type = other RNA
gtgttccagccaccggcccagggcaatgaacacaaagagcatggggggcgtgtcgaagaatgtcacagggctcctctccgccttctcagctacagc

SEQ ID NO: 13827 - RNA, 96 nt, synthetic construct
  source 1..96: mol_type = other RNA
gtgttccagccaccggcccagggcaatgaacacaaagagcatggggggcgtgtcgaagaatgtcacagggctcctctccgccttctcagcaacagc

SEQ ID NO: 13828 - RNA, 96 nt, synthetic construct
  source 1..96: mol_type = other RNA
gtgttccagccaccggcccagggcaatgaacacaaagagcatggggggcgtgtcgaagaatgtcacagggctcctctccgccttctcagccacagc

SEQ ID NO: 13829 - RNA, 96 nt, synthetic construct
  source 1..96: mol_type = other RNA
gtgttccagccaccggcccagggcaatgaacacaaagagcatggggggcgtgtcgaagaatgtcacagggctcctctccgccttctcagcgacagc

SEQ ID NO: 13830 - RNA, 97 nt, synthetic construct
  source 1..97: mol_type = other RNA
agtgttccagccaccggcccagggcaatgaacacaaagagcatggggggcgtgtcgaagaatgtcacagggctcctctccgccttctcagccacagc

SEQ ID NO: 13831 - RNA, 97 nt, synthetic construct
  source 1..97: mol_type = other RNA
agtgttccagccaccggcccagggcaatgaacacaaagagcatggggggcgtgtcgaagaatgtcacagggctcctctccgccttctcagctacagc

SEQ ID NO: 13832 - RNA, 97 nt, synthetic construct
  source 1..97: mol_type = other RNA
agtgttccagccaccggcccagggcaatgaacacaaagagcatggggggcgtgtcgaagaatgtcacagggctcctctccgccttctcagcgacagc

SEQ ID NO: 13833 - RNA, 97 nt, synthetic construct
  source 1..97: mol_type = other RNA
agtgttccagccaccggcccagggcaatgaacacaaagagcatggggggcgtgtcgaagaatgtcacagggctcctctccgccttctcagcaacagc

SEQ ID NO: 13834 - RNA, 98 nt, synthetic construct
  source 1..98: mol_type = other RNA
aagtgttccagccaccggcccagggcaatgaacacaaagagcatggggggcgtgtcgaagaatgtcacagggctcctctccgccttctcagctacagc

SEQ ID NO: 13835 - RNA, 98 nt, synthetic construct
  source 1..98: mol_type = other RNA
aagtgttccagccaccggcccagggcaatgaacacaaagagcatggggggcgtgtcgaagaatgtcacagggctcctctccgccttctcagcgacagc

SEQ ID NO: 13836 - RNA, 98 nt, synthetic construct
  source 1..98: mol_type = other RNA
aagtgttccagccaccggcccagggcaatgaacacaaagagcatggggggcgtgtcgaagaatgtcacagggctcctctccgccttctcagccacagc

SEQ ID NO: 13837 - RNA, 98 nt, synthetic construct
  source 1..98: mol_type = other RNA
aagtgttccagccaccggcccagggcaatgaacacaaagagcatggggggcgtgtcgaagaatgtcacagggctcctctccgccttctcagcaacagc

SEQ ID NO: 13838 - RNA, 99 nt, synthetic construct
  source 1..99: mol_type = other RNA
caagtgttccagccaccggcccagggcaatgaacacaaagagcatggggggcgtgtcgaagaatgtcacagggctcctctccgccttctcagcaacagc

SEQ ID NO: 13839 - RNA, 99 nt, synthetic construct
  source 1..99: mol_type = other RNA
caagtgttccagccaccggcccagggcaatgaacacaaagagcatggggggcgtgtcgaagaatgtcacagggctcctctccgccttctcagctacagc

SEQ ID NO: 13840 - RNA, 99 nt, synthetic construct
  source 1..99: mol_type = other RNA
caagtgttccagccaccggcccagggcaatgaacacaaagagcatggggggcgtgtcgaagaatgtcacagggctcctctccgccttctcagccacagc

SEQ ID NO: 13841 - RNA, 99 nt, synthetic construct
  source 1..99: mol_type = other RNA
caagtgttccagccaccggcccagggcaatgaacacaaagagcatggggggcgtgtcgaagaatgtcacagggctcctctccgccttctcagcgacagc

SEQ ID NO: 13842 - RNA, 100 nt, synthetic construct
  source 1..100: mol_type = other RNA
ccaagtgttccagccaccggcccagggcaatgaacacaaagagcatggggggcgtgtcgaagaatgtcacagggctcctctccgccttctcagcgacagc

SEQ ID NO: 13843 - RNA, 100 nt, synthetic construct
  source 1..100: mol_type = other RNA
ccaagtgttccagccaccggcccagggcaatgaacacaaagagcatggggggcgtgtcgaagaatgtcacagggctcctctccgccttctcagctacagc

SEQ ID NO: 13844 - RNA, 100 nt, synthetic construct
  source 1..100: mol_type = other RNA
ccaagtgttccagccaccggcccagggcaatgaacacaaagagcatggggggcgtgtcgaagaatgtcacagggctcctctccgccttctcagcaacagc

SEQ ID NO: 13845 - RNA, 100 nt, synthetic construct
  source 1..100: mol_type = other RNA
ccaagtgttccagccaccggcccagggcaatgaacacaaagagcatggggggcgtgtcgaagaatgtcacagggctcctctccgccttctcagccacagc

SEQ ID NO: 13846 - RNA, 16 nt, synthetic construct
  source 1..16: mol_type = other RNA
tgctgtggctgagaag

SEQ ID NO: 13847 - RNA, 17 nt, synthetic construct
  source 1..17: mol_type = other RNA
ttgctgtggctgagaag

SEQ ID NO: 13848 - RNA, 18 nt, synthetic construct
  source 1..18: mol_type = other RNA
gttgctgtggctgagaag

SEQ ID NO: 13849 - RNA, 19 nt, synthetic construct
  source 1..19: mol_type = other RNA
ggttgctgtggctgagaag

SEQ ID NO: 13850 - RNA, 20 nt, synthetic construct
  source 1..20: mol_type = other RNA
tggttgctgtggctgagaag

SEQ ID NO: 13851 - RNA, 21 nt, synthetic construct
  source 1..21: mol_type = other RNA
gtggttgctgtggctgagaag

SEQ ID NO: 13852 - RNA, 22 nt, synthetic construct
  source 1..22: mol_type = other RNA
ggtggttgctgtggctgagaag

SEQ ID NO: 13853-13857 - skipped (5 entries)

SEQ ID NO: 13858 - RNA, 10 nt, synthetic construct
  source 1..10: mol_type = other RNA
ctcagccaca

SEQ ID NO: 13859 - RNA, 11 nt, synthetic construct
  source 1..11: mol_type = other RNA
ctcagccacag

SEQ ID NO: 13860 - RNA, 12 nt, synthetic construct
  source 1..12: mol_type = other RNA
ctcagccacagc

SEQ ID NO: 13861 - RNA, 13 nt, synthetic construct
  source 1..13: mol_type = other RNA
ctcagccacagca

SEQ ID NO: 13862 - RNA, 14 nt, synthetic construct
  source 1..14: mol_type = other RNA
ctcagccacagcaa

SEQ ID NO: 13863 - RNA, 15 nt, synthetic construct
  source 1..15: mol_type = other RNA
ctcagccacagcaac

SEQ ID NO: 13864 - RNA, 16 nt, synthetic construct
  source 1..16: mol_type = other RNA
ctcagccacagcaacc

SEQ ID NO: 13865 - RNA, 17 nt, synthetic construct
  source 1..17: mol_type = other RNA
ctcagccacagcaacca

SEQ ID NO: 13866 - RNA, 18 nt, synthetic construct
  source 1..18: mol_type = other RNA
ctcagccacagcaaccac

SEQ ID NO: 13867 - RNA, 19 nt, synthetic construct
  source 1..19: mol_type = other RNA
ctcagccacagcaaccacc

SEQ ID NO: 13868 - RNA, 71 nt, synthetic construct
  source 1..71: mol_type = other RNA
cggcccagggcaatgaacacaaagagcatggggggcgtgtcgaagaatgtcacagggctcctctctgcctt

SEQ ID NO: 13869 - RNA, 71 nt, synthetic construct
  source 1..71: mol_type = other RNA
cggcccagggcaatgaacacaaagagcatggggggcgtgtcgaagaatgtcacagggctcctctcggcctt

SEQ ID NO: 13870 - RNA, 71 nt, synthetic construct
  source 1..71: mol_type = other RNA
cggcccagggcaatgaacacaaagagcatggggggcgtgtcgaagaatgtcacagggctcctctccgcctt

SEQ ID NO: 13871 - RNA, 71 nt, synthetic construct
  source 1..71: mol_type = other RNA
cggcccagggcaatgaacacaaagagcatggggggcgtgtcgaagaatgtcacagggctcctctcagcctt

SEQ ID NO: 13872 - RNA, 72 nt, synthetic construct
  source 1..72: mol_type = other RNA
ccggcccagggcaatgaacacaaagagcatggggggcgtgtcgaagaatgtcacagggctcctctctgcctt

SEQ ID NO: 13873 - RNA, 72 nt, synthetic construct
  source 1..72: mol_type = other RNA
ccggcccagggcaatgaacacaaagagcatggggggcgtgtcgaagaatgtcacagggctcctctcagcctt

SEQ ID NO: 13874 - RNA, 72 nt, synthetic construct
  source 1..72: mol_type = other RNA
ccggcccagggcaatgaacacaaagagcatggggggcgtgtcgaagaatgtcacagggctcctctccgcctt

SEQ ID NO: 13875 - RNA, 72 nt, synthetic construct
  source 1..72: mol_type = other RNA
ccggcccagggcaatgaacacaaagagcatggggggcgtgtcgaagaatgtcacagggctcctctcggcctt

SEQ ID NO: 13876 - RNA, 73 nt, synthetic construct
  source 1..73: mol_type = other RNA
accggcccagggcaatgaacacaaagagcatggggggcgtgtcgaagaatgtcacagggctcctctctgcctt

SEQ ID NO: 13877 - RNA, 73 nt, synthetic construct
  source 1..73: mol_type = other RNA
accggcccagggcaatgaacacaaagagcatggggggcgtgtcgaagaatgtcacagggctcctctccgcctt

SEQ ID NO: 13878 - RNA, 73 nt, synthetic construct
  source 1..73: mol_type = other RNA
accggcccagggcaatgaacacaaagagcatggggggcgtgtcgaagaatgtcacagggctcctctcagcctt

SEQ ID NO: 13879 - RNA, 73 nt, synthetic construct
  source 1..73: mol_type = other RNA
accggcccagggcaatgaacacaaagagcatggggggcgtgtcgaagaatgtcacagggctcctctcggcctt

SEQ ID NO: 13880 - RNA, 74 nt, synthetic construct
  source 1..74: mol_type = other RNA
caccggcccagggcaatgaacacaaagagcatggggggcgtgtcgaagaatgtcacagggctcctctcggcctt

SEQ ID NO: 13881 - RNA, 74 nt, synthetic construct
  source 1..74: mol_type = other RNA
caccggcccagggcaatgaacacaaagagcatggggggcgtgtcgaagaatgtcacagggctcctctcagcctt

SEQ ID NO: 13882 - RNA, 74 nt, synthetic construct
  source 1..74: mol_type = other RNA
caccggcccagggcaatgaacacaaagagcatggggggcgtgtcgaagaatgtcacagggctcctctctgcctt

SEQ ID NO: 13883 - RNA, 74 nt, synthetic construct
  source 1..74: mol_type = other RNA
caccggcccagggcaatgaacacaaagagcatggggggcgtgtcgaagaatgtcacagggctcctctccgcctt

SEQ ID NO: 13884 - RNA, 75 nt, synthetic construct
  source 1..75: mol_type = other RNA
ccaccggcccagggcaatgaacacaaagagcatggggggcgtgtcgaagaatgtcacagggctcctctctgcctt

SEQ ID NO: 13885 - RNA, 75 nt, synthetic construct
  source 1..75: mol_type = other RNA
ccaccggcccagggcaatgaacacaaagagcatggggggcgtgtcgaagaatgtcacagggctcctctcggcctt

SEQ ID NO: 13886 - RNA, 75 nt, synthetic construct
  source 1..75: mol_type = other RNA
ccaccggcccagggcaatgaacacaaagagcatggggggcgtgtcgaagaatgtcacagggctcctctcagcctt

SEQ ID NO: 13887 - RNA, 75 nt, synthetic construct
  source 1..75: mol_type = other RNA
ccaccggcccagggcaatgaacacaaagagcatggggggcgtgtcgaagaatgtcacagggctcctctccgcctt

SEQ ID NO: 13888 - RNA, 76 nt, synthetic construct
  source 1..76: mol_type = other RNA
gccaccggcccagggcaatgaacacaaagagcatggggggcgtgtcgaagaatgtcacagggctcctctccgcctt

SEQ ID NO: 13889 - RNA, 76 nt, synthetic construct
  source 1..76: mol_type = other RNA
gccaccggcccagggcaatgaacacaaagagcatggggggcgtgtcgaagaatgtcacagggctcctctcggcctt

SEQ ID NO: 13890 - RNA, 76 nt, synthetic construct
  source 1..76: mol_type = other RNA
gccaccggcccagggcaatgaacacaaagagcatggggggcgtgtcgaagaatgtcacagggctcctctcagcctt

SEQ ID NO: 13891 - RNA, 76 nt, synthetic construct
  source 1..76: mol_type = other RNA
gccaccggcccagggcaatgaacacaaagagcatggggggcgtgtcgaagaatgtcacagggctcctctctgcctt

SEQ ID NO: 13892 - RNA, 77 nt, synthetic construct
  source 1..77: mol_type = other RNA
agccaccggcccagggcaatgaacacaaagagcatggggggcgtgtcgaagaatgtcacagggctcctctccgcctt

SEQ ID NO: 13893 - RNA, 77 nt, synthetic construct
  source 1..77: mol_type = other RNA
agccaccggcccagggcaatgaacacaaagagcatggggggcgtgtcgaagaatgtcacagggctcctctctgcctt

SEQ ID NO: 13894 - RNA, 77 nt, synthetic construct
  source 1..77: mol_type = other RNA
agccaccggcccagggcaatgaacacaaagagcatggggggcgtgtcgaagaatgtcacagggctcctctcggcctt

SEQ ID NO: 13895 - RNA, 77 nt, synthetic construct
  source 1..77: mol_type = other RNA
agccaccggcccagggcaatgaacacaaagagcatggggggcgtgtcgaagaatgtcacagggctcctctcagcctt

SEQ ID NO: 13896 - RNA, 78 nt, synthetic construct
  source 1..78: mol_type = other RNA
cagccaccggcccagggcaatgaacacaaagagcatggggggcgtgtcgaagaatgtcacagggctcctctcagcctt

SEQ ID NO: 13897 - RNA, 78 nt, synthetic construct
  source 1..78: mol_type = other RNA
cagccaccggcccagggcaatgaacacaaagagcatggggggcgtgtcgaagaatgtcacagggctcctctcggcctt

SEQ ID NO: 13898 - RNA, 78 nt, synthetic construct
  source 1..78: mol_type = other RNA
cagccaccggcccagggcaatgaacacaaagagcatggggggcgtgtcgaagaatgtcacagggctcctctccgcctt

SEQ ID NO: 13899 - RNA, 78 nt, synthetic construct
  source 1..78: mol_type = other RNA
cagccaccggcccagggcaatgaacacaaagagcatggggggcgtgtcgaagaatgtcacagggctcctctctgcctt

SEQ ID NO: 13900 - RNA, 79 nt, synthetic construct
  source 1..79: mol_type = other RNA
ccagccaccggcccagggcaatgaacacaaagagcatggggggcgtgtcgaagaatgtcacagggctcctctcagcctt

SEQ ID NO: 13901 - RNA, 79 nt, synthetic construct
  source 1..79: mol_type = other RNA
ccagccaccggcccagggcaatgaacacaaagagcatggggggcgtgtcgaagaatgtcacagggctcctctcggcctt

SEQ ID NO: 13902 - RNA, 79 nt, synthetic construct
  source 1..79: mol_type = other RNA
ccagccaccggcccagggcaatgaacacaaagagcatggggggcgtgtcgaagaatgtcacagggctcctctctgcctt

SEQ ID NO: 13903 - RNA, 79 nt, synthetic construct
  source 1..79: mol_type = other RNA
ccagccaccggcccagggcaatgaacacaaagagcatggggggcgtgtcgaagaatgtcacagggctcctctccgcctt

SEQ ID NO: 13904 - RNA, 80 nt, synthetic construct
  source 1..80: mol_type = other RNA
tccagccaccggcccagggcaatgaacacaaagagcatggggggcgtgtcgaagaatgtcacagggctcctctcggcctt

SEQ ID NO: 13905 - RNA, 80 nt, synthetic construct
  source 1..80: mol_type = other RNA
tccagccaccggcccagggcaatgaacacaaagagcatggggggcgtgtcgaagaatgtcacagggctcctctctgcctt

SEQ ID NO: 13906 - RNA, 80 nt, synthetic construct
  source 1..80: mol_type = other RNA
tccagccaccggcccagggcaatgaacacaaagagcatggggggcgtgtcgaagaatgtcacagggctcctctccgcctt

SEQ ID NO: 13907 - RNA, 80 nt, synthetic construct
  source 1..80: mol_type = other RNA
tccagccaccggcccagggcaatgaacacaaagagcatggggggcgtgtcgaagaatgtcacagggctcctctcagcctt

SEQ ID NO: 13908 - RNA, 81 nt, synthetic construct
  source 1..81: mol_type = other RNA
ttccagccaccggcccagggcaatgaacacaaagagcatggggggcgtgtcgaagaatgtcacagggctcctctccgcctt

SEQ ID NO: 13909 - RNA, 81 nt, synthetic construct
  source 1..81: mol_type = other RNA
ttccagccaccggcccagggcaatgaacacaaagagcatggggggcgtgtcgaagaatgtcacagggctcctctctgcctt

SEQ ID NO: 13910 - RNA, 81 nt, synthetic construct
  source 1..81: mol_type = other RNA
ttccagccaccggcccagggcaatgaacacaaagagcatggggggcgtgtcgaagaatgtcacagggctcctctcggcctt

SEQ ID NO: 13911 - RNA, 81 nt, synthetic construct
  source 1..81: mol_type = other RNA
ttccagccaccggcccagggcaatgaacacaaagagcatggggggcgtgtcgaagaatgtcacagggctcctctcagcctt

SEQ ID NO: 13912 - RNA, 82 nt, synthetic construct
  source 1..82: mol_type = other RNA
gttccagccaccggcccagggcaatgaacacaaagagcatggggggcgtgtcgaagaatgtcacagggctcctctccgcctt

SEQ ID NO: 13913 - RNA, 82 nt, synthetic construct
  source 1..82: mol_type = other RNA
gttccagccaccggcccagggcaatgaacacaaagagcatggggggcgtgtcgaagaatgtcacagggctcctctctgcctt

SEQ ID NO: 13914 - RNA, 82 nt, synthetic construct
  source 1..82: mol_type = other RNA
gttccagccaccggcccagggcaatgaacacaaagagcatggggggcgtgtcgaagaatgtcacagggctcctctcagcctt

SEQ ID NO: 13915 - RNA, 82 nt, synthetic construct
  source 1..82: mol_type = other RNA
gttccagccaccggcccagggcaatgaacacaaagagcatggggggcgtgtcgaagaatgtcacagggctcctctcggcctt

SEQ ID NO: 13916 - RNA, 83 nt, synthetic construct
  source 1..83: mol_type = other RNA
tgttccagccaccggcccagggcaatgaacacaaagagcatggggggcgtgtcgaagaatgtcacagggctcctctctgcctt

SEQ ID NO: 13917 - RNA, 83 nt, synthetic construct
  source 1..83: mol_type = other RNA
tgttccagccaccggcccagggcaatgaacacaaagagcatggggggcgtgtcgaagaatgtcacagggctcctctcagcctt

SEQ ID NO: 13918 - RNA, 83 nt, synthetic construct
  source 1..83: mol_type = other RNA
tgttccagccaccggcccagggcaatgaacacaaagagcatggggggcgtgtcgaagaatgtcacagggctcctctccgcctt

SEQ ID NO: 13919 - RNA, 83 nt, synthetic construct
  source 1..83: mol_type = other RNA
tgttccagccaccggcccagggcaatgaacacaaagagcatggggggcgtgtcgaagaatgtcacagggctcctctcggcctt

SEQ ID NO: 13920 - RNA, 84 nt, synthetic construct
  source 1..84: mol_type = other RNA
gtgttccagccaccggcccagggcaatgaacacaaagagcatggggggcgtgtcgaagaatgtcacagggctcctctctgcctt

SEQ ID NO: 13921 - RNA, 84 nt, synthetic construct
  source 1..84: mol_type = other RNA
gtgttccagccaccggcccagggcaatgaacacaaagagcatggggggcgtgtcgaagaatgtcacagggctcctctcggcctt

SEQ ID NO: 13922 - RNA, 84 nt, synthetic construct
  source 1..84: mol_type = other RNA
gtgttccagccaccggcccagggcaatgaacacaaagagcatggggggcgtgtcgaagaatgtcacagggctcctctccgcctt

SEQ ID NO: 13923 - RNA, 84 nt, synthetic construct
  source 1..84: mol_type = other RNA
gtgttccagccaccggcccagggcaatgaacacaaagagcatggggggcgtgtcgaagaatgtcacagggctcctctcagcctt

SEQ ID NO: 13924 - RNA, 85 nt, synthetic construct
  source 1..85: mol_type = other RNA
agtgttccagccaccggcccagggcaatgaacacaaagagcatggggggcgtgtcgaagaatgtcacagggctcctctccgcctt

SEQ ID NO: 13925 - RNA, 85 nt, synthetic construct
  source 1..85: mol_type = other RNA
agtgttccagccaccggcccagggcaatgaacacaaagagcatggggggcgtgtcgaagaatgtcacagggctcctctctgcctt

SEQ ID NO: 13926 - RNA, 85 nt, synthetic construct
  source 1..85: mol_type = other RNA
agtgttccagccaccggcccagggcaatgaacacaaagagcatggggggcgtgtcgaagaatgtcacagggctcctctcggcctt

SEQ ID NO: 13927 - RNA, 85 nt, synthetic construct
  source 1..85: mol_type = other RNA
agtgttccagccaccggcccagggcaatgaacacaaagagcatggggggcgtgtcgaagaatgtcacagggctcctctcagcctt

SEQ ID NO: 13928 - RNA, 86 nt, synthetic construct
  source 1..86: mol_type = other RNA
aagtgttccagccaccggcccagggcaatgaacacaaagagcatggggggcgtgtcgaagaatgtcacagggctcctctcggcctt

SEQ ID NO: 13929 - RNA, 86 nt, synthetic construct
  source 1..86: mol_type = other RNA
aagtgttccagccaccggcccagggcaatgaacacaaagagcatggggggcgtgtcgaagaatgtcacagggctcctctcagcctt

SEQ ID NO: 13930 - RNA, 86 nt, synthetic construct
  source 1..86: mol_type = other RNA
aagtgttccagccaccggcccagggcaatgaacacaaagagcatggggggcgtgtcgaagaatgtcacagggctcctctccgcctt

SEQ ID NO: 13931 - RNA, 86 nt, synthetic construct
  source 1..86: mol_type = other RNA
aagtgttccagccaccggcccagggcaatgaacacaaagagcatggggggcgtgtcgaagaatgtcacagggctcctctctgcctt

SEQ ID NO: 13932 - RNA, 87 nt, synthetic construct
  source 1..87: mol_type = other RNA
caagtgttccagccaccggcccagggcaatgaacacaaagagcatggggggcgtgtcgaagaatgtcacagggctcctctcagcctt

SEQ ID NO: 13933 - RNA, 87 nt, synthetic construct
  source 1..87: mol_type = other RNA
caagtgttccagccaccggcccagggcaatgaacacaaagagcatggggggcgtgtcgaagaatgtcacagggctcctctctgcctt

SEQ ID NO: 13934 - RNA, 87 nt, synthetic construct
  source 1..87: mol_type = other RNA
caagtgttccagccaccggcccagggcaatgaacacaaagagcatggggggcgtgtcgaagaatgtcacagggctcctctcggcctt

SEQ ID NO: 13935 - RNA, 87 nt, synthetic construct
  source 1..87: mol_type = other RNA
caagtgttccagccaccggcccagggcaatgaacacaaagagcatggggggcgtgtcgaagaatgtcacagggctcctctccgcctt

SEQ ID NO: 13936 - RNA, 88 nt, synthetic construct
  source 1..88: mol_type = other RNA
ccaagtgttccagccaccggcccagggcaatgaacacaaagagcatggggggcgtgtcgaagaatgtcacagggctcctctctgcctt

SEQ ID NO: 13937 - RNA, 88 nt, synthetic construct
  source 1..88: mol_type = other RNA
ccaagtgttccagccaccggcccagggcaatgaacacaaagagcatggggggcgtgtcgaagaatgtcacagggctcctctcagcctt

SEQ ID NO: 13938 - RNA, 88 nt, synthetic construct
  source 1..88: mol_type = other RNA
ccaagtgttccagccaccggcccagggcaatgaacacaaagagcatggggggcgtgtcgaagaatgtcacagggctcctctccgcctt

SEQ ID NO: 13939 - RNA, 88 nt, synthetic construct
  source 1..88: mol_type = other RNA
ccaagtgttccagccaccggcccagggcaatgaacacaaagagcatggggggcgtgtcgaagaatgtcacagggctcctctcggcctt

SEQ ID NO: 13940 - RNA, 89 nt, synthetic construct
  source 1..89: mol_type = other RNA
gccaagtgttccagccaccggcccagggcaatgaacacaaagagcatggggggcgtgtcgaagaatgtcacagggctcctctcagcctt

SEQ ID NO: 13941 - RNA, 89 nt, synthetic construct
  source 1..89: mol_type = other RNA
gccaagtgttccagccaccggcccagggcaatgaacacaaagagcatggggggcgtgtcgaagaatgtcacagggctcctctccgcctt

SEQ ID NO: 13942 - RNA, 89 nt, synthetic construct
  source 1..89: mol_type = other RNA
gccaagtgttccagccaccggcccagggcaatgaacacaaagagcatggggggcgtgtcgaagaatgtcacagggctcctctcggcctt

SEQ ID NO: 13943 - RNA, 89 nt, synthetic construct
  source 1..89: mol_type = other RNA
gccaagtgttccagccaccggcccagggcaatgaacacaaagagcatggggggcgtgtcgaagaatgtcacagggctcctctctgcctt

SEQ ID NO: 13944 - RNA, 90 nt, synthetic construct
  source 1..90: mol_type = other RNA
tgccaagtgttccagccaccggcccagggcaatgaacacaaagagcatggggggcgtgtcgaagaatgtcacagggctcctctctgcctt

SEQ ID NO: 13945 - RNA, 90 nt, synthetic construct
  source 1..90: mol_type = other RNA
tgccaagtgttccagccaccggcccagggcaatgaacacaaagagcatggggggcgtgtcgaagaatgtcacagggctcctctcggcctt

SEQ ID NO: 13946 - RNA, 90 nt, synthetic construct
  source 1..90: mol_type = other RNA
tgccaagtgttccagccaccggcccagggcaatgaacacaaagagcatggggggcgtgtcgaagaatgtcacagggctcctctccgcctt

SEQ ID NO: 13947 - RNA, 90 nt, synthetic construct
  source 1..90: mol_type = other RNA
tgccaagtgttccagccaccggcccagggcaatgaacacaaagagcatggggggcgtgtcgaagaatgtcacagggctcctctcagcctt

SEQ ID NO: 13948 - RNA, 91 nt, synthetic construct
  source 1..91: mol_type = other RNA
ttgccaagtgttccagccaccggcccagggcaatgaacacaaagagcatggggggcgtgtcgaagaatgtcacagggctcctctcagcctt

SEQ ID NO: 13949 - RNA, 91 nt, synthetic construct
  source 1..91: mol_type = other RNA
ttgccaagtgttccagccaccggcccagggcaatgaacacaaagagcatggggggcgtgtcgaagaatgtcacagggctcctctcggcctt

SEQ ID NO: 13950 - RNA, 91 nt, synthetic construct
  source 1..91: mol_type = other RNA
ttgccaagtgttccagccaccggcccagggcaatgaacacaaagagcatggggggcgtgtcgaagaatgtcacagggctcctctctgcctt

SEQ ID NO: 13951 - RNA, 91 nt, synthetic construct
  source 1..91: mol_type = other RNA
ttgccaagtgttccagccaccggcccagggcaatgaacacaaagagcatggggggcgtgtcgaagaatgtcacagggctcctctccgcctt

SEQ ID NO: 13952 - RNA, 92 nt, synthetic construct
  source 1..92: mol_type = other RNA
tttgccaagtgttccagccaccggcccagggcaatgaacacaaagagcatggggggcgtgtcgaagaatgtcacagggctcctctctgcctt

SEQ ID NO: 13953 - RNA, 92 nt, synthetic construct
  source 1..92: mol_type = other RNA
tttgccaagtgttccagccaccggcccagggcaatgaacacaaagagcatggggggcgtgtcgaagaatgtcacagggctcctctccgcctt

SEQ ID NO: 13954 - RNA, 92 nt, synthetic construct
  source 1..92: mol_type = other RNA
tttgccaagtgttccagccaccggcccagggcaatgaacacaaagagcatggggggcgtgtcgaagaatgtcacagggctcctctcggcctt

SEQ ID NO: 13955 - RNA, 92 nt, synthetic construct
  source 1..92: mol_type = other RNA
tttgccaagtgttccagccaccggcccagggcaatgaacacaaagagcatggggggcgtgtcgaagaatgtcacagggctcctctcagcctt

SEQ ID NO: 13956 - RNA, 93 nt, synthetic construct
  source 1..93: mol_type = other RNA
ctttgccaagtgttccagccaccggcccagggcaatgaacacaaagagcatggggggcgtgtcgaagaatgtcacagggctcctctccgcctt

SEQ ID NO: 13957 - RNA, 93 nt, synthetic construct
  source 1..93: mol_type = other RNA
ctttgccaagtgttccagccaccggcccagggcaatgaacacaaagagcatggggggcgtgtcgaagaatgtcacagggctcctctctgcctt

SEQ ID NO: 13958 - RNA, 93 nt, synthetic construct
  source 1..93: mol_type = other RNA
ctttgccaagtgttccagccaccggcccagggcaatgaacacaaagagcatggggggcgtgtcgaagaatgtcacagggctcctctcggcctt

SEQ ID NO: 13959 - RNA, 93 nt, synthetic construct
  source 1..93: mol_type = other RNA
ctttgccaagtgttccagccaccggcccagggcaatgaacacaaagagcatggggggcgtgtcgaagaatgtcacagggctcctctcagcctt

SEQ ID NO: 13960 - RNA, 94 nt, synthetic construct
  source 1..94: mol_type = other RNA
cctttgccaagtgttccagccaccggcccagggcaatgaacacaaagagcatggggggcgtgtcgaagaatgtcacagggctcctctctgcctt

SEQ ID NO: 13961 - RNA, 94 nt, synthetic construct
  source 1..94: mol_type = other RNA
cctttgccaagtgttccagccaccggcccagggcaatgaacacaaagagcatggggggcgtgtcgaagaatgtcacagggctcctctcggcctt

SEQ ID NO: 13962 - RNA, 94 nt, synthetic construct
  source 1..94: mol_type = other RNA
cctttgccaagtgttccagccaccggcccagggcaatgaacacaaagagcatggggggcgtgtcgaagaatgtcacagggctcctctccgcctt

SEQ ID NO: 13963 - RNA, 94 nt, synthetic construct
  source 1..94: mol_type = other RNA
cctttgccaagtgttccagccaccggcccagggcaatgaacacaaagagcatggggggcgtgtcgaagaatgtcacagggctcctctcagcctt

SEQ ID NO: 13964 - RNA, 95 nt, synthetic construct
  source 1..95: mol_type = other RNA
acctttgccaagtgttccagccaccggcccagggcaatgaacacaaagagcatggggggcgtgtcgaagaatgtcacagggctcctctctgcctt

SEQ ID NO: 13965 - RNA, 95 nt, synthetic construct
  source 1..95: mol_type = other RNA
acctttgccaagtgttccagccaccggcccagggcaatgaacacaaagagcatggggggcgtgtcgaagaatgtcacagggctcctctcagcctt

SEQ ID NO: 13966 - RNA, 95 nt, synthetic construct
  source 1..95: mol_type = other RNA
acctttgccaagtgttccagccaccggcccagggcaatgaacacaaagagcatggggggcgtgtcgaagaatgtcacagggctcctctcggcctt

SEQ ID NO: 13967 - RNA, 95 nt, synthetic construct
  source 1..95: mol_type = other RNA
acctttgccaagtgttccagccaccggcccagggcaatgaacacaaagagcatggggggcgtgtcgaagaatgtcacagggctcctctccgcctt

SEQ ID NO: 13968 - RNA, 96 nt, synthetic construct
  source 1..96: mol_type = other RNA
tacctttgccaagtgttccagccaccggcccagggcaatgaacacaaagagcatggggggcgtgtcgaagaatgtcacagggctcctctcagcctt

SEQ ID NO: 13969 - RNA, 96 nt, synthetic construct
  source 1..96: mol_type = other RNA
tacctttgccaagtgttccagccaccggcccagggcaatgaacacaaagagcatggggggcgtgtcgaagaatgtcacagggctcctctcggcctt

SEQ ID NO: 13970 - RNA, 96 nt, synthetic construct
  source 1..96: mol_type = other RNA
tacctttgccaagtgttccagccaccggcccagggcaatgaacacaaagagcatggggggcgtgtcgaagaatgtcacagggctcctctctgcctt

SEQ ID NO: 13971 - RNA, 96 nt, synthetic construct
  source 1..96: mol_type = other RNA
tacctttgccaagtgttccagccaccggcccagggcaatgaacacaaagagcatggggggcgtgtcgaagaatgtcacagggctcctctccgcctt

SEQ ID NO: 13972 - RNA, 97 nt, synthetic construct
  source 1..97: mol_type = other RNA
ttacctttgccaagtgttccagccaccggcccagggcaatgaacacaaagagcatggggggcgtgtcgaagaatgtcacagggctcctctctgcctt

SEQ ID NO: 13973 - RNA, 97 nt, synthetic construct
  source 1..97: mol_type = other RNA
ttacctttgccaagtgttccagccaccggcccagggcaatgaacacaaagagcatggggggcgtgtcgaagaatgtcacagggctcctctcggcctt

SEQ ID NO: 13974 - RNA, 97 nt, synthetic construct
  source 1..97: mol_type = other RNA
ttacctttgccaagtgttccagccaccggcccagggcaatgaacacaaagagcatggggggcgtgtcgaagaatgtcacagggctcctctcagcctt

SEQ ID NO: 13975 - RNA, 97 nt, synthetic construct
  source 1..97: mol_type = other RNA
ttacctttgccaagtgttccagccaccggcccagggcaatgaacacaaagagcatggggggcgtgtcgaagaatgtcacagggctcctctccgcctt

SEQ ID NO: 13976 - RNA, 98 nt, synthetic construct
  source 1..98: mol_type = other RNA
gttacctttgccaagtgttccagccaccggcccagggcaatgaacacaaagagcatggggggcgtgtcgaagaatgtcacagggctcctctcagcctt

SEQ ID NO: 13977 - RNA, 98 nt, synthetic construct
  source 1..98: mol_type = other RNA
gttacctttgccaagtgttccagccaccggcccagggcaatgaacacaaagagcatggggggcgtgtcgaagaatgtcacagggctcctctcggcctt

SEQ ID NO: 13978 - RNA, 98 nt, synthetic construct
  source 1..98: mol_type = other RNA
gttacctttgccaagtgttccagccaccggcccagggcaatgaacacaaagagcatggggggcgtgtcgaagaatgtcacagggctcctctccgcctt

SEQ ID NO: 13979 - RNA, 98 nt, synthetic construct
  source 1..98: mol_type = other RNA
gttacctttgccaagtgttccagccaccggcccagggcaatgaacacaaagagcatggggggcgtgtcgaagaatgtcacagggctcctctctgcctt

SEQ ID NO: 13980 - RNA, 99 nt, synthetic construct
  source 1..99: mol_type = other RNA
tgttacctttgccaagtgttccagccaccggcccagggcaatgaacacaaagagcatggggggcgtgtcgaagaatgtcacagggctcctctccgcctt

SEQ ID NO: 13981 - RNA, 99 nt, synthetic construct
  source 1..99: mol_type = other RNA
tgttacctttgccaagtgttccagccaccggcccagggcaatgaacacaaagagcatggggggcgtgtcgaagaatgtcacagggctcctctcggcctt

SEQ ID NO: 13982 - RNA, 99 nt, synthetic construct
  source 1..99: mol_type = other RNA
tgttacctttgccaagtgttccagccaccggcccagggcaatgaacacaaagagcatggggggcgtgtcgaagaatgtcacagggctcctctctgcctt

SEQ ID NO: 13983 - RNA, 99 nt, synthetic construct
  source 1..99: mol_type = other RNA
tgttacctttgccaagtgttccagccaccggcccagggcaatgaacacaaagagcatggggggcgtgtcgaagaatgtcacagggctcctctcagcctt

SEQ ID NO: 13984 - RNA, 100 nt, synthetic construct
  source 1..100: mol_type = other RNA
ctgttacctttgccaagtgttccagccaccggcccagggcaatgaacacaaagagcatggggggcgtgtcgaagaatgtcacagggctcctctcggcctt

SEQ ID NO: 13985 - RNA, 100 nt, synthetic construct
  source 1..100: mol_type = other RNA
ctgttacctttgccaagtgttccagccaccggcccagggcaatgaacacaaagagcatggggggcgtgtcgaagaatgtcacagggctcctctccgcctt

SEQ ID NO: 13986 - RNA, 100 nt, synthetic construct
  source 1..100: mol_type = other RNA
ctgttacctttgccaagtgttccagccaccggcccagggcaatgaacacaaagagcatggggggcgtgtcgaagaatgtcacagggctcctctcagcctt

SEQ ID NO: 13987 - RNA, 100 nt, synthetic construct
  source 1..100: mol_type = other RNA
ctgttacctttgccaagtgttccagccaccggcccagggcaatgaacacaaagagcatggggggcgtgtcgaagaatgtcacagggctcctctctgcctt

SEQ ID NO: 13988 - RNA, 16 nt, synthetic construct
  source 1..16: mol_type = other RNA
ctttgtgttcattgcc

SEQ ID NO: 13989 - RNA, 17 nt, synthetic construct
  source 1..17: mol_type = other RNA
tctttgtgttcattgcc

SEQ ID NO: 13990 - RNA, 18 nt, synthetic construct
  source 1..18: mol_type = other RNA
ctctttgtgttcattgcc

SEQ ID NO: 13991 - RNA, 19 nt, synthetic construct
  source 1..19: mol_type = other RNA
gctctttgtgttcattgcc

SEQ ID NO: 13992 - RNA, 20 nt, synthetic construct
  source 1..20: mol_type = other RNA
tgctctttgtgttcattgcc

SEQ ID NO: 13993 - RNA, 21 nt, synthetic construct
  source 1..21: mol_type = other RNA
atgctctttgtgttcattgcc

SEQ ID NO: 13994 - RNA, 22 nt, synthetic construct
  source 1..22: mol_type = other RNA
catgctctttgtgttcattgcc

SEQ ID NO: 13995-13999 - skipped (5 entries)

SEQ ID NO: 14000 - RNA, 10 nt, synthetic construct
  source 1..10: mol_type = other RNA
aatgaacaca

SEQ ID NO: 14001 - RNA, 11 nt, synthetic construct
  source 1..11: mol_type = other RNA
aatgaacacaa

SEQ ID NO: 14002 - RNA, 12 nt, synthetic construct
  source 1..12: mol_type = other RNA
aatgaacacaaa

SEQ ID NO: 14003 - RNA, 13 nt, synthetic construct
  source 1..13: mol_type = other RNA
aatgaacacaaag

SEQ ID NO: 14004 - RNA, 14 nt, synthetic construct
  source 1..14: mol_type = other RNA
aatgaacacaaaga

SEQ ID NO: 14005 - RNA, 15 nt, synthetic construct
  source 1..15: mol_type = other RNA
aatgaacacaaagag

SEQ ID NO: 14006 - RNA, 16 nt, synthetic construct
  source 1..16: mol_type = other RNA
aatgaacacaaagagc

SEQ ID NO: 14007 - RNA, 17 nt, synthetic construct
  source 1..17: mol_type = other RNA
aatgaacacaaagagca

SEQ ID NO: 14008 - RNA, 18 nt, synthetic construct
  source 1..18: mol_type = other RNA
aatgaacacaaagagcat

SEQ ID NO: 14009 - RNA, 19 nt, synthetic construct
  source 1..19: mol_type = other RNA
aatgaacacaaagagcatg

SEQ ID NO: 14010 - RNA, 11 nt, synthetic construct
  source 1..11: mol_type = other RNA
cggcccagggc

SEQ ID NO: 14011 - RNA, 11 nt, synthetic construct
  source 1..11: mol_type = other RNA
cggccaagggc

SEQ ID NO: 14012 - RNA, 11 nt, synthetic construct
  source 1..11: mol_type = other RNA
cggcctaaggc

SEQ ID NO: 14013 - RNA, 11 nt, synthetic construct
  source 1..11: mol_type = other RNA
cggccgagggc

SEQ ID NO: 14014 - RNA, 11 nt, synthetic construct
  source 1..11: mol_type = other RNA
cggcctagggc

SEQ ID NO: 14015 - RNA, 12 nt, synthetic construct
  source 1..12: mol_type = other RNA
ccggccaagggc

SEQ ID NO: 14016 - RNA, 12 nt, synthetic construct
  source 1..12: mol_type = other RNA
ccggcccagggc

SEQ ID NO: 14017 - RNA, 12 nt, synthetic construct
  source 1..12: mol_type = other RNA
ccggccgagggc

SEQ ID NO: 14018 - RNA, 12 nt, synthetic construct
  source 1..12: mol_type = other RNA
ccggcctagggc

SEQ ID NO: 14019 - RNA, 12 nt, synthetic construct
  source 1..12: mol_type = other RNA
ccggcctaaggc

SEQ ID NO: 14020 - RNA, 13 nt, synthetic construct
  source 1..13: mol_type = other RNA
accggcctaaggc

SEQ ID NO: 14021 - RNA, 13 nt, synthetic construct
  source 1..13: mol_type = other RNA
accggccaagggc

SEQ ID NO: 14022 - RNA, 13 nt, synthetic construct
  source 1..13: mol_type = other RNA
accggccgagggc

SEQ ID NO: 14023 - RNA, 13 nt, synthetic construct
  source 1..13: mol_type = other RNA
accggcctagggc

SEQ ID NO: 14024 - RNA, 13 nt, synthetic construct
  source 1..13: mol_type = other RNA
accggcccagggc

SEQ ID NO: 14025 - RNA, 14 nt, synthetic construct
  source 1..14: mol_type = other RNA
caccggcctagggc

SEQ ID NO: 14026 - RNA, 14 nt, synthetic construct
  source 1..14: mol_type = other RNA
caccggcccagggc

SEQ ID NO: 14027 - RNA, 14 nt, synthetic construct
  source 1..14: mol_type = other RNA
caccggccaagggc

SEQ ID NO: 14028 - RNA, 14 nt, synthetic construct
  source 1..14: mol_type = other RNA
caccggcctaaggc

SEQ ID NO: 14029 - RNA, 14 nt, synthetic construct
  source 1..14: mol_type = other RNA
caccggccgagggc

SEQ ID NO: 14030 - RNA, 15 nt, synthetic construct
  source 1..15: mol_type = other RNA
ccaccggcccagggc

SEQ ID NO: 14031 - RNA, 15 nt, synthetic construct
  source 1..15: mol_type = other RNA
ccaccggcctaaggc

SEQ ID NO: 14032 - RNA, 15 nt, synthetic construct
  source 1..15: mol_type = other RNA
ccaccggccaagggc

SEQ ID NO: 14033 - RNA, 15 nt, synthetic construct
  source 1..15: mol_type = other RNA
ccaccggcctagggc

SEQ ID NO: 14034 - RNA, 15 nt, synthetic construct
  source 1..15: mol_type = other RNA
ccaccggccgagggc

SEQ ID NO: 14035 - RNA, 16 nt, synthetic construct
  source 1..16: mol_type = other RNA
gccaccggcctaaggc

SEQ ID NO: 14036 - RNA, 16 nt, synthetic construct
  source 1..16: mol_type = other RNA
gccaccggcctagggc

SEQ ID NO: 14037 - RNA, 16 nt, synthetic construct
  source 1..16: mol_type = other RNA
gccaccggccgagggc

SEQ ID NO: 14038 - RNA, 16 nt, synthetic construct
  source 1..16: mol_type = other RNA
gccaccggcccagggc

SEQ ID NO: 14039 - RNA, 16 nt, synthetic construct
  source 1..16: mol_type = other RNA
gccaccggccaagggc

SEQ ID NO: 14040 - RNA, 17 nt, synthetic construct
  source 1..17: mol_type = other RNA
agccaccggcctaaggc

SEQ ID NO: 14041 - RNA, 17 nt, synthetic construct
  source 1..17: mol_type = other RNA
agccaccggcccagggc

SEQ ID NO: 14042 - RNA, 17 nt, synthetic construct
  source 1..17: mol_type = other RNA
agccaccggcctagggc

SEQ ID NO: 14043 - RNA, 17 nt, synthetic construct
  source 1..17: mol_type = other RNA
agccaccggccaagggc

SEQ ID NO: 14044 - RNA, 17 nt, synthetic construct
  source 1..17: mol_type = other RNA
agccaccggccgagggc

SEQ ID NO: 14045 - RNA, 18 nt, synthetic construct
  source 1..18: mol_type = other RNA
cagccaccggcctagggc

SEQ ID NO: 14046 - RNA, 18 nt, synthetic construct
  source 1..18: mol_type = other RNA
cagccaccggcccagggc

SEQ ID NO: 14047 - RNA, 18 nt, synthetic construct
  source 1..18: mol_type = other RNA
cagccaccggccaagggc

SEQ ID NO: 14048 - RNA, 18 nt, synthetic construct
  source 1..18: mol_type = other RNA
cagccaccggccgagggc

SEQ ID NO: 14049 - RNA, 18 nt, synthetic construct
  source 1..18: mol_type = other RNA
cagccaccggcctaaggc

SEQ ID NO: 14050 - RNA, 19 nt, synthetic construct
  source 1..19: mol_type = other RNA
ccagccaccggccaagggc

SEQ ID NO: 14051 - RNA, 19 nt, synthetic construct
  source 1..19: mol_type = other RNA
ccagccaccggcccagggc

SEQ ID NO: 14052 - RNA, 19 nt, synthetic construct
  source 1..19: mol_type = other RNA
ccagccaccggccgagggc

SEQ ID NO: 14053 - RNA, 19 nt, synthetic construct
  source 1..19: mol_type = other RNA
ccagccaccggcctagggc

SEQ ID NO: 14054 - RNA, 19 nt, synthetic construct
  source 1..19: mol_type = other RNA
ccagccaccggcctaaggc

SEQ ID NO: 14055 - RNA, 20 nt, synthetic construct
  source 1..20: mol_type = other RNA
tccagccaccggccgagggc

SEQ ID NO: 14056 - RNA, 20 nt, synthetic construct
  source 1..20: mol_type = other RNA
tccagccaccggcctagggc

SEQ ID NO: 14057 - RNA, 20 nt, synthetic construct
  source 1..20: mol_type = other RNA
tccagccaccggcctaaggc

SEQ ID NO: 14058 - RNA, 20 nt, synthetic construct
  source 1..20: mol_type = other RNA
tccagccaccggccaagggc

SEQ ID NO: 14059 - RNA, 20 nt, synthetic construct
  source 1..20: mol_type = other RNA
tccagccaccggcccagggc

SEQ ID NO: 14060 - RNA, 21 nt, synthetic construct
  source 1..21: mol_type = other RNA
ttccagccaccggcctagggc

SEQ ID NO: 14061 - RNA, 21 nt, synthetic construct
  source 1..21: mol_type = other RNA
ttccagccaccggccaagggc

SEQ ID NO: 14062 - RNA, 21 nt, synthetic construct
  source 1..21: mol_type = other RNA
ttccagccaccggcccagggc

SEQ ID NO: 14063 - RNA, 21 nt, synthetic construct
  source 1..21: mol_type = other RNA
ttccagccaccggcctaaggc

SEQ ID NO: 14064 - RNA, 21 nt, synthetic construct
  source 1..21: mol_type = other RNA
ttccagccaccggccgagggc

SEQ ID NO: 14065 - RNA, 22 nt, synthetic construct
  source 1..22: mol_type = other RNA
gttccagccaccggcccagggc

SEQ ID NO: 14066 - RNA, 22 nt, synthetic construct
  source 1..22: mol_type = other RNA
gttccagccaccggcctaaggc

SEQ ID NO: 14067 - RNA, 22 nt, synthetic construct
  source 1..22: mol_type = other RNA
gttccagccaccggccaagggc

SEQ ID NO: 14068 - RNA, 22 nt, synthetic construct
  source 1..22: mol_type = other RNA
gttccagccaccggcctagggc

SEQ ID NO: 14069 - RNA, 22 nt, synthetic construct
  source 1..22: mol_type = other RNA
gttccagccaccggccgagggc

SEQ ID NO: 14070 - RNA, 23 nt, synthetic construct
  source 1..23: mol_type = other RNA
tgttccagccaccggccaagggc

SEQ ID NO: 14071 - RNA, 23 nt, synthetic construct
  source 1..23: mol_type = other RNA
tgttccagccaccggcctagggc

SEQ ID NO: 14072 - RNA, 23 nt, synthetic construct
  source 1..23: mol_type = other RNA
tgttccagccaccggccgagggc

SEQ ID NO: 14073 - RNA, 23 nt, synthetic construct
  source 1..23: mol_type = other RNA
tgttccagccaccggcctaaggc

SEQ ID NO: 14074 - RNA, 23 nt, synthetic construct
  source 1..23: mol_type = other RNA
tgttccagccaccggcccagggc

SEQ ID NO: 14075 - RNA, 24 nt, synthetic construct
  source 1..24: mol_type = other RNA
gtgttccagccaccggcctagggc

SEQ ID NO: 14076 - RNA, 24 nt, synthetic construct
  source 1..24: mol_type = other RNA
gtgttccagccaccggcctaaggc

SEQ ID NO: 14077 - RNA, 24 nt, synthetic construct
  source 1..24: mol_type = other RNA
gtgttccagccaccggccaagggc

SEQ ID NO: 14078 - RNA, 24 nt, synthetic construct
  source 1..24: mol_type = other RNA
gtgttccagccaccggccgagggc

SEQ ID NO: 14079 - RNA, 24 nt, synthetic construct
  source 1..24: mol_type = other RNA
gtgttccagccaccggcccagggc

SEQ ID NO: 14080 - RNA, 25 nt, synthetic construct
  source 1..25: mol_type = other RNA
agtgttccagccaccggccgagggc

SEQ ID NO: 14081 - RNA, 25 nt, synthetic construct
  source 1..25: mol_type = other RNA
agtgttccagccaccggccaagggc

SEQ ID NO: 14082 - RNA, 25 nt, synthetic construct
  source 1..25: mol_type = other RNA
agtgttccagccaccggcctaaggc

SEQ ID NO: 14083 - RNA, 25 nt, synthetic construct
  source 1..25: mol_type = other RNA
agtgttccagccaccggcccagggc

SEQ ID NO: 14084 - RNA, 25 nt, synthetic construct
  source 1..25: mol_type = other RNA
agtgttccagccaccggcctagggc

SEQ ID NO: 14085 - RNA, 26 nt, synthetic construct
  source 1..26: mol_type = other RNA
aagtgttccagccaccggccaagggc

SEQ ID NO: 14086 - RNA, 26 nt, synthetic construct
  source 1..26: mol_type = other RNA
aagtgttccagccaccggcctagggc

SEQ ID NO: 14087 - RNA, 26 nt, synthetic construct
  source 1..26: mol_type = other RNA
aagtgttccagccaccggcccagggc

SEQ ID NO: 14088 - RNA, 26 nt, synthetic construct
  source 1..26: mol_type = other RNA
aagtgttccagccaccggccgagggc

SEQ ID NO: 14089 - RNA, 26 nt, synthetic construct
  source 1..26: mol_type = other RNA
aagtgttccagccaccggcctaaggc

SEQ ID NO: 14090 - RNA, 27 nt, synthetic construct
  source 1..27: mol_type = other RNA
caagtgttccagccaccggcccagggc

SEQ ID NO: 14091 - RNA, 27 nt, synthetic construct
  source 1..27: mol_type = other RNA
caagtgttccagccaccggcctaaggc

SEQ ID NO: 14092 - RNA, 27 nt, synthetic construct
  source 1..27: mol_type = other RNA
caagtgttccagccaccggcctagggc

SEQ ID NO: 14093 - RNA, 27 nt, synthetic construct
  source 1..27: mol_type = other RNA
caagtgttccagccaccggccaagggc

SEQ ID NO: 14094 - RNA, 27 nt, synthetic construct
  source 1..27: mol_type = other RNA
caagtgttccagccaccggccgagggc

SEQ ID NO: 14095 - RNA, 28 nt, synthetic construct
  source 1..28: mol_type = other RNA
ccaagtgttccagccaccggcctagggc

SEQ ID NO: 14096 - RNA, 28 nt, synthetic construct
  source 1..28: mol_type = other RNA
ccaagtgttccagccaccggcccagggc

SEQ ID NO: 14097 - RNA, 28 nt, synthetic construct
  source 1..28: mol_type = other RNA
ccaagtgttccagccaccggcctaaggc

SEQ ID NO: 14098 - RNA, 28 nt, synthetic construct
  source 1..28: mol_type = other RNA
ccaagtgttccagccaccggccaagggc

SEQ ID NO: 14099 - RNA, 28 nt, synthetic construct
  source 1..28: mol_type = other RNA
ccaagtgttccagccaccggccgagggc

SEQ ID NO: 14100 - RNA, 29 nt, synthetic construct
  source 1..29: mol_type = other RNA
gccaagtgttccagccaccggcccagggc

SEQ ID NO: 14101 - RNA, 29 nt, synthetic construct
  source 1..29: mol_type = other RNA
gccaagtgttccagccaccggccaagggc

SEQ ID NO: 14102 - RNA, 29 nt, synthetic construct
  source 1..29: mol_type = other RNA
gccaagtgttccagccaccggccgagggc

SEQ ID NO: 14103 - RNA, 29 nt, synthetic construct
  source 1..29: mol_type = other RNA
gccaagtgttccagccaccggcctagggc

SEQ ID NO: 14104 - RNA, 29 nt, synthetic construct
  source 1..29: mol_type = other RNA
gccaagtgttccagccaccggcctaaggc

SEQ ID NO: 14105 - RNA, 30 nt, synthetic construct
  source 1..30: mol_type = other RNA
tgccaagtgttccagccaccggcctagggc

SEQ ID NO: 14106 - RNA, 30 nt, synthetic construct
  source 1..30: mol_type = other RNA
tgccaagtgttccagccaccggccaagggc

SEQ ID NO: 14107 - RNA, 30 nt, synthetic construct
  source 1..30: mol_type = other RNA
tgccaagtgttccagccaccggccgagggc

SEQ ID NO: 14108 - RNA, 30 nt, synthetic construct
  source 1..30: mol_type = other RNA
tgccaagtgttccagccaccggcctaaggc

SEQ ID NO: 14109 - RNA, 30 nt, synthetic construct
  source 1..30: mol_type = other RNA
tgccaagtgttccagccaccggcccagggc

SEQ ID NO: 14110 - RNA, 31 nt, synthetic construct
  source 1..31: mol_type = other RNA
ttgccaagtgttccagccaccggcctaaggc

SEQ ID NO: 14111 - RNA, 31 nt, synthetic construct
  source 1..31: mol_type = other RNA
ttgccaagtgttccagccaccggccaagggc

SEQ ID NO: 14112 - RNA, 31 nt, synthetic construct
  source 1..31: mol_type = other RNA
ttgccaagtgttccagccaccggcctagggc

SEQ ID NO: 14113 - RNA, 31 nt, synthetic construct
  source 1..31: mol_type = other RNA
ttgccaagtgttccagccaccggccgagggc

SEQ ID NO: 14114 - RNA, 31 nt, synthetic construct
  source 1..31: mol_type = other RNA
ttgccaagtgttccagccaccggcccagggc

SEQ ID NO: 14115 - RNA, 32 nt, synthetic construct
  source 1..32: mol_type = other RNA
tttgccaagtgttccagccaccggcccagggc

SEQ ID NO: 14116 - RNA, 32 nt, synthetic construct
  source 1..32: mol_type = other RNA
tttgccaagtgttccagccaccggcctagggc

SEQ ID NO: 14117 - RNA, 32 nt, synthetic construct
  source 1..32: mol_type = other RNA
tttgccaagtgttccagccaccggccgagggc

SEQ ID NO: 14118 - RNA, 32 nt, synthetic construct
  source 1..32: mol_type = other RNA
tttgccaagtgttccagccaccggccaagggc

SEQ ID NO: 14119 - RNA, 32 nt, synthetic construct
  source 1..32: mol_type = other RNA
tttgccaagtgttccagccaccggcctaaggc

SEQ ID NO: 14120 - RNA, 33 nt, synthetic construct
  source 1..33: mol_type = other RNA
ctttgccaagtgttccagccaccggccgagggc

SEQ ID NO: 14121 - RNA, 33 nt, synthetic construct
  source 1..33: mol_type = other RNA
ctttgccaagtgttccagccaccggcccagggc

SEQ ID NO: 14122 - RNA, 33 nt, synthetic construct
  source 1..33: mol_type = other RNA
ctttgccaagtgttccagccaccggcctaaggc

SEQ ID NO: 14123 - RNA, 33 nt, synthetic construct
  source 1..33: mol_type = other RNA
ctttgccaagtgttccagccaccggcctagggc

SEQ ID NO: 14124 - RNA, 33 nt, synthetic construct
  source 1..33: mol_type = other RNA
ctttgccaagtgttccagccaccggccaagggc

SEQ ID NO: 14125 - RNA, 34 nt, synthetic construct
  source 1..34: mol_type = other RNA
cctttgccaagtgttccagccaccggcctaaggc

SEQ ID NO: 14126 - RNA, 34 nt, synthetic construct
  source 1..34: mol_type = other RNA
cctttgccaagtgttccagccaccggcccagggc

SEQ ID NO: 14127 - RNA, 34 nt, synthetic construct
  source 1..34: mol_type = other RNA
cctttgccaagtgttccagccaccggcctagggc

SEQ ID NO: 14128 - RNA, 34 nt, synthetic construct
  source 1..34: mol_type = other RNA
cctttgccaagtgttccagccaccggccgagggc

SEQ ID NO: 14129 - RNA, 34 nt, synthetic construct
  source 1..34: mol_type = other RNA
cctttgccaagtgttccagccaccggccaagggc

SEQ ID NO: 14130 - RNA, 35 nt, synthetic construct
  source 1..35: mol_type = other RNA
acctttgccaagtgttccagccaccggccgagggc

SEQ ID NO: 14131 - RNA, 35 nt, synthetic construct
  source 1..35: mol_type = other RNA
acctttgccaagtgttccagccaccggcctaaggc

SEQ ID NO: 14132 - RNA, 35 nt, synthetic construct
  source 1..35: mol_type = other RNA
acctttgccaagtgttccagccaccggcctagggc

SEQ ID NO: 14133 - RNA, 35 nt, synthetic construct
  source 1..35: mol_type = other RNA
acctttgccaagtgttccagccaccggcccagggc

SEQ ID NO: 14134 - RNA, 35 nt, synthetic construct
  source 1..35: mol_type = other RNA
acctttgccaagtgttccagccaccggccaagggc

SEQ ID NO: 14135 - RNA, 36 nt, synthetic construct
  source 1..36: mol_type = other RNA
tacctttgccaagtgttccagccaccggccaagggc

SEQ ID NO: 14136 - RNA, 36 nt, synthetic construct
  source 1..36: mol_type = other RNA
tacctttgccaagtgttccagccaccggccgagggc

SEQ ID NO: 14137 - RNA, 36 nt, synthetic construct
  source 1..36: mol_type = other RNA
tacctttgccaagtgttccagccaccggcctaaggc

SEQ ID NO: 14138 - RNA, 36 nt, synthetic construct
  source 1..36: mol_type = other RNA
tacctttgccaagtgttccagccaccggcctagggc

SEQ ID NO: 14139 - RNA, 36 nt, synthetic construct
  source 1..36: mol_type = other RNA
tacctttgccaagtgttccagccaccggcccagggc

SEQ ID NO: 14140 - RNA, 37 nt, synthetic construct
  source 1..37: mol_type = other RNA
ttacctttgccaagtgttccagccaccggccgagggc

SEQ ID NO: 14141 - RNA, 37 nt, synthetic construct
  source 1..37: mol_type = other RNA
ttacctttgccaagtgttccagccaccggcccagggc

SEQ ID NO: 14142 - RNA, 37 nt, synthetic construct
  source 1..37: mol_type = other RNA
ttacctttgccaagtgttccagccaccggcctaaggc

SEQ ID NO: 14143 - RNA, 37 nt, synthetic construct
  source 1..37: mol_type = other RNA
ttacctttgccaagtgttccagccaccggcctagggc

SEQ ID NO: 14144 - RNA, 37 nt, synthetic construct
  source 1..37: mol_type = other RNA
ttacctttgccaagtgttccagccaccggccaagggc

SEQ ID NO: 14145 - RNA, 38 nt, synthetic construct
  source 1..38: mol_type = other RNA
gttacctttgccaagtgttccagccaccggcctagggc

SEQ ID NO: 14146 - RNA, 38 nt, synthetic construct
  source 1..38: mol_type = other RNA
gttacctttgccaagtgttccagccaccggccaagggc

SEQ ID NO: 14147 - RNA, 38 nt, synthetic construct
  source 1..38: mol_type = other RNA
gttacctttgccaagtgttccagccaccggccgagggc

SEQ ID NO: 14148 - RNA, 38 nt, synthetic construct
  source 1..38: mol_type = other RNA
gttacctttgccaagtgttccagccaccggcccagggc

SEQ ID NO: 14149 - RNA, 38 nt, synthetic construct
  source 1..38: mol_type = other RNA
gttacctttgccaagtgttccagccaccggcctaaggc

SEQ ID NO: 14150 - RNA, 39 nt, synthetic construct
  source 1..39: mol_type = other RNA
tgttacctttgccaagtgttccagccaccggccgagggc

SEQ ID NO: 14151 - RNA, 39 nt, synthetic construct
  source 1..39: mol_type = other RNA
tgttacctttgccaagtgttccagccaccggcctagggc

SEQ ID NO: 14152 - RNA, 39 nt, synthetic construct
  source 1..39: mol_type = other RNA
tgttacctttgccaagtgttccagccaccggccaagggc

SEQ ID NO: 14153 - RNA, 39 nt, synthetic construct
  source 1..39: mol_type = other RNA
tgttacctttgccaagtgttccagccaccggcccagggc

SEQ ID NO: 14154 - RNA, 39 nt, synthetic construct
  source 1..39: mol_type = other RNA
tgttacctttgccaagtgttccagccaccggcctaaggc

SEQ ID NO: 14155 - RNA, 40 nt, synthetic construct
  source 1..40: mol_type = other RNA
ctgttacctttgccaagtgttccagccaccggccgagggc

SEQ ID NO: 14156 - RNA, 40 nt, synthetic construct
  source 1..40: mol_type = other RNA
ctgttacctttgccaagtgttccagccaccggcctagggc

SEQ ID NO: 14157 - RNA, 40 nt, synthetic construct
  source 1..40: mol_type = other RNA
ctgttacctttgccaagtgttccagccaccggccaagggc

SEQ ID NO: 14158 - RNA, 40 nt, synthetic construct
  source 1..40: mol_type = other RNA
ctgttacctttgccaagtgttccagccaccggcccagggc

SEQ ID NO: 14159 - RNA, 40 nt, synthetic construct
  source 1..40: mol_type = other RNA
ctgttacctttgccaagtgttccagccaccggcctaaggc

SEQ ID NO: 14160 - RNA, 41 nt, synthetic construct
  source 1..41: mol_type = other RNA
gctgttacctttgccaagtgttccagccaccggcctaaggc

SEQ ID NO: 14161 - RNA, 41 nt, synthetic construct
  source 1..41: mol_type = other RNA
gctgttacctttgccaagtgttccagccaccggccgagggc

SEQ ID NO: 14162 - RNA, 41 nt, synthetic construct
  source 1..41: mol_type = other RNA
gctgttacctttgccaagtgttccagccaccggcccagggc

SEQ ID NO: 14163 - RNA, 41 nt, synthetic construct
  source 1..41: mol_type = other RNA
gctgttacctttgccaagtgttccagccaccggccaagggc

SEQ ID NO: 14164 - RNA, 41 nt, synthetic construct
  source 1..41: mol_type = other RNA
gctgttacctttgccaagtgttccagccaccggcctagggc

SEQ ID NO: 14165 - RNA, 42 nt, synthetic construct
  source 1..42: mol_type = other RNA
tgctgttacctttgccaagtgttccagccaccggcctagggc

SEQ ID NO: 14166 - RNA, 42 nt, synthetic construct
  source 1..42: mol_type = other RNA
tgctgttacctttgccaagtgttccagccaccggccaagggc

SEQ ID NO: 14167 - RNA, 42 nt, synthetic construct
  source 1..42: mol_type = other RNA
tgctgttacctttgccaagtgttccagccaccggccgagggc

SEQ ID NO: 14168 - RNA, 42 nt, synthetic construct
  source 1..42: mol_type = other RNA
tgctgttacctttgccaagtgttccagccaccggcctaaggc

SEQ ID NO: 14169 - RNA, 42 nt, synthetic construct
  source 1..42: mol_type = other RNA
tgctgttacctttgccaagtgttccagccaccggcccagggc

SEQ ID NO: 14170 - RNA, 43 nt, synthetic construct
  source 1..43: mol_type = other RNA
ctgctgttacctttgccaagtgttccagccaccggcctagggc

SEQ ID NO: 14171 - RNA, 43 nt, synthetic construct
  source 1..43: mol_type = other RNA
ctgctgttacctttgccaagtgttccagccaccggcctaaggc

SEQ ID NO: 14172 - RNA, 43 nt, synthetic construct
  source 1..43: mol_type = other RNA
ctgctgttacctttgccaagtgttccagccaccggcccagggc

SEQ ID NO: 14173 - RNA, 43 nt, synthetic construct
  source 1..43: mol_type = other RNA
ctgctgttacctttgccaagtgttccagccaccggccaagggc

SEQ ID NO: 14174 - RNA, 43 nt, synthetic construct
  source 1..43: mol_type = other RNA
ctgctgttacctttgccaagtgttccagccaccggccgagggc

SEQ ID NO: 14175 - RNA, 44 nt, synthetic construct
  source 1..44: mol_type = other RNA
gctgctgttacctttgccaagtgttccagccaccggcccagggc

SEQ ID NO: 14176 - RNA, 44 nt, synthetic construct
  source 1..44: mol_type = other RNA
gctgctgttacctttgccaagtgttccagccaccggccgagggc

SEQ ID NO: 14177 - RNA, 44 nt, synthetic construct
  source 1..44: mol_type = other RNA
gctgctgttacctttgccaagtgttccagccaccggcctagggc

SEQ ID NO: 14178 - RNA, 44 nt, synthetic construct
  source 1..44: mol_type = other RNA
gctgctgttacctttgccaagtgttccagccaccggccaagggc

SEQ ID NO: 14179 - RNA, 44 nt, synthetic construct
  source 1..44: mol_type = other RNA
gctgctgttacctttgccaagtgttccagccaccggcctaaggc

SEQ ID NO: 14180 - RNA, 45 nt, synthetic construct
  source 1..45: mol_type = other RNA
agctgctgttacctttgccaagtgttccagccaccggccgagggc

SEQ ID NO: 14181 - RNA, 45 nt, synthetic construct
  source 1..45: mol_type = other RNA
agctgctgttacctttgccaagtgttccagccaccggccaagggc

SEQ ID NO: 14182 - RNA, 45 nt, synthetic construct
  source 1..45: mol_type = other RNA
agctgctgttacctttgccaagtgttccagccaccggcctagggc

SEQ ID NO: 14183 - RNA, 45 nt, synthetic construct
  source 1..45: mol_type = other RNA
agctgctgttacctttgccaagtgttccagccaccggcctaaggc

SEQ ID NO: 14184 - RNA, 45 nt, synthetic construct
  source 1..45: mol_type = other RNA
agctgctgttacctttgccaagtgttccagccaccggcccagggc

SEQ ID NO: 14185 - RNA, 46 nt, synthetic construct
  source 1..46: mol_type = other RNA
aagctgctgttacctttgccaagtgttccagccaccggccaagggc

SEQ ID NO: 14186 - RNA, 46 nt, synthetic construct
  source 1..46: mol_type = other RNA
aagctgctgttacctttgccaagtgttccagccaccggccgagggc

SEQ ID NO: 14187 - RNA, 46 nt, synthetic construct
  source 1..46: mol_type = other RNA
aagctgctgttacctttgccaagtgttccagccaccggcctagggc

SEQ ID NO: 14188 - RNA, 46 nt, synthetic construct
  source 1..46: mol_type = other RNA
aagctgctgttacctttgccaagtgttccagccaccggcccagggc

SEQ ID NO: 14189 - RNA, 46 nt, synthetic construct
  source 1..46: mol_type = other RNA
aagctgctgttacctttgccaagtgttccagccaccggcctaaggc

SEQ ID NO: 14190 - RNA, 47 nt, synthetic construct
  source 1..47: mol_type = other RNA
gaagctgctgttacctttgccaagtgttccagccaccggcccagggc

SEQ ID NO: 14191 - RNA, 47 nt, synthetic construct
  source 1..47: mol_type = other RNA
gaagctgctgttacctttgccaagtgttccagccaccggcctaaggc

SEQ ID NO: 14192 - RNA, 47 nt, synthetic construct
  source 1..47: mol_type = other RNA
gaagctgctgttacctttgccaagtgttccagccaccggcctagggc

SEQ ID NO: 14193 - RNA, 47 nt, synthetic construct
  source 1..47: mol_type = other RNA
gaagctgctgttacctttgccaagtgttccagccaccggccaagggc

SEQ ID NO: 14194 - RNA, 47 nt, synthetic construct
  source 1..47: mol_type = other RNA
gaagctgctgttacctttgccaagtgttccagccaccggccgagggc

SEQ ID NO: 14195 - RNA, 48 nt, synthetic construct
  source 1..48: mol_type = other RNA
tgaagctgctgttacctttgccaagtgttccagccaccggcctaaggc

SEQ ID NO: 14196 - RNA, 48 nt, synthetic construct
  source 1..48: mol_type = other RNA
tgaagctgctgttacctttgccaagtgttccagccaccggcctagggc

SEQ ID NO: 14197 - RNA, 48 nt, synthetic construct
  source 1..48: mol_type = other RNA
tgaagctgctgttacctttgccaagtgttccagccaccggcccagggc

SEQ ID NO: 14198 - RNA, 48 nt, synthetic construct
  source 1..48: mol_type = other RNA
tgaagctgctgttacctttgccaagtgttccagccaccggccaagggc

SEQ ID NO: 14199 - RNA, 48 nt, synthetic construct
  source 1..48: mol_type = other RNA
tgaagctgctgttacctttgccaagtgttccagccaccggccgagggc

SEQ ID NO: 14200 - RNA, 49 nt, synthetic construct
  source 1..49: mol_type = other RNA
ctgaagctgctgttacctttgccaagtgttccagccaccggccgagggc

SEQ ID NO: 14201 - RNA, 49 nt, synthetic construct
  source 1..49: mol_type = other RNA
ctgaagctgctgttacctttgccaagtgttccagccaccggcctagggc

SEQ ID NO: 14202 - RNA, 49 nt, synthetic construct
  source 1..49: mol_type = other RNA
ctgaagctgctgttacctttgccaagtgttccagccaccggcccagggc

SEQ ID NO: 14203 - RNA, 49 nt, synthetic construct
  source 1..49: mol_type = other RNA
ctgaagctgctgttacctttgccaagtgttccagccaccggccaagggc

SEQ ID NO: 14204 - RNA, 49 nt, synthetic construct
  source 1..49: mol_type = other RNA
ctgaagctgctgttacctttgccaagtgttccagccaccggcctaaggc

SEQ ID NO: 14205 - RNA, 50 nt, synthetic construct
  source 1..50: mol_type = other RNA
cctgaagctgctgttacctttgccaagtgttccagccaccggcccagggc

SEQ ID NO: 14206 - RNA, 50 nt, synthetic construct
  source 1..50: mol_type = other RNA
cctgaagctgctgttacctttgccaagtgttccagccaccggccgagggc

SEQ ID NO: 14207 - RNA, 50 nt, synthetic construct
  source 1..50: mol_type = other RNA
cctgaagctgctgttacctttgccaagtgttccagccaccggcctagggc

SEQ ID NO: 14208 - RNA, 50 nt, synthetic construct
  source 1..50: mol_type = other RNA
cctgaagctgctgttacctttgccaagtgttccagccaccggccaagggc

SEQ ID NO: 14209 - RNA, 50 nt, synthetic construct
  source 1..50: mol_type = other RNA
cctgaagctgctgttacctttgccaagtgttccagccaccggcctaaggc

SEQ ID NO: 14210 - RNA, 51 nt, synthetic construct
  source 1..51: mol_type = other RNA
acctgaagctgctgttacctttgccaagtgttccagccaccggcctaaggc

SEQ ID NO: 14211 - RNA, 51 nt, synthetic construct
  source 1..51: mol_type = other RNA
acctgaagctgctgttacctttgccaagtgttccagccaccggcctagggc

SEQ ID NO: 14212 - RNA, 51 nt, synthetic construct
  source 1..51: mol_type = other RNA
acctgaagctgctgttacctttgccaagtgttccagccaccggcccagggc

SEQ ID NO: 14213 - RNA, 51 nt, synthetic construct
  source 1..51: mol_type = other RNA
acctgaagctgctgttacctttgccaagtgttccagccaccggccgagggc

SEQ ID NO: 14214 - RNA, 51 nt, synthetic construct
  source 1..51: mol_type = other RNA
acctgaagctgctgttacctttgccaagtgttccagccaccggccaagggc

SEQ ID NO: 14215 - RNA, 52 nt, synthetic construct
  source 1..52: mol_type = other RNA
aacctgaagctgctgttacctttgccaagtgttccagccaccggccgagggc

SEQ ID NO: 14216 - RNA, 52 nt, synthetic construct
  source 1..52: mol_type = other RNA
aacctgaagctgctgttacctttgccaagtgttccagccaccggccaagggc

SEQ ID NO: 14217 - RNA, 52 nt, synthetic construct
  source 1..52: mol_type = other RNA
aacctgaagctgctgttacctttgccaagtgttccagccaccggcccagggc

SEQ ID NO: 14218 - RNA, 52 nt, synthetic construct
  source 1..52: mol_type = other RNA
aacctgaagctgctgttacctttgccaagtgttccagccaccggcctagggc

SEQ ID NO: 14219 - RNA, 52 nt, synthetic construct
  source 1..52: mol_type = other RNA
aacctgaagctgctgttacctttgccaagtgttccagccaccggcctaaggc

SEQ ID NO: 14220 - RNA, 53 nt, synthetic construct
  source 1..53: mol_type = other RNA
gaacctgaagctgctgttacctttgccaagtgttccagccaccggcctagggc

SEQ ID NO: 14221 - RNA, 53 nt, synthetic construct
  source 1..53: mol_type = other RNA
gaacctgaagctgctgttacctttgccaagtgttccagccaccggccgagggc

SEQ ID NO: 14222 - RNA, 53 nt, synthetic construct
  source 1..53: mol_type = other RNA
gaacctgaagctgctgttacctttgccaagtgttccagccaccggcctaaggc

SEQ ID NO: 14223 - RNA, 53 nt, synthetic construct
  source 1..53: mol_type = other RNA
gaacctgaagctgctgttacctttgccaagtgttccagccaccggccaagggc

SEQ ID NO: 14224 - RNA, 53 nt, synthetic construct
  source 1..53: mol_type = other RNA
gaacctgaagctgctgttacctttgccaagtgttccagccaccggcccagggc

SEQ ID NO: 14225 - RNA, 54 nt, synthetic construct
  source 1..54: mol_type = other RNA
tgaacctgaagctgctgttacctttgccaagtgttccagccaccggccaagggc

SEQ ID NO: 14226 - RNA, 54 nt, synthetic construct
  source 1..54: mol_type = other RNA
tgaacctgaagctgctgttacctttgccaagtgttccagccaccggcctagggc

SEQ ID NO: 14227 - RNA, 54 nt, synthetic construct
  source 1..54: mol_type = other RNA
tgaacctgaagctgctgttacctttgccaagtgttccagccaccggccgagggc

SEQ ID NO: 14228 - RNA, 54 nt, synthetic construct
  source 1..54: mol_type = other RNA
tgaacctgaagctgctgttacctttgccaagtgttccagccaccggcctaaggc

SEQ ID NO: 14229 - RNA, 54 nt, synthetic construct
  source 1..54: mol_type = other RNA
tgaacctgaagctgctgttacctttgccaagtgttccagccaccggcccagggc

SEQ ID NO: 14230 - RNA, 55 nt, synthetic construct
  source 1..55: mol_type = other RNA
ctgaacctgaagctgctgttacctttgccaagtgttccagccaccggccgagggc

SEQ ID NO: 14231 - RNA, 55 nt, synthetic construct
  source 1..55: mol_type = other RNA
ctgaacctgaagctgctgttacctttgccaagtgttccagccaccggccaagggc

SEQ ID NO: 14232 - RNA, 55 nt, synthetic construct
  source 1..55: mol_type = other RNA
ctgaacctgaagctgctgttacctttgccaagtgttccagccaccggcctagggc

SEQ ID NO: 14233 - RNA, 55 nt, synthetic construct
  source 1..55: mol_type = other RNA
ctgaacctgaagctgctgttacctttgccaagtgttccagccaccggcccagggc

SEQ ID NO: 14234 - RNA, 55 nt, synthetic construct
  source 1..55: mol_type = other RNA
ctgaacctgaagctgctgttacctttgccaagtgttccagccaccggcctaaggc

SEQ ID NO: 14235 - RNA, 56 nt, synthetic construct
  source 1..56: mol_type = other RNA
tctgaacctgaagctgctgttacctttgccaagtgttccagccaccggcctaaggc

SEQ ID NO: 14236 - RNA, 56 nt, synthetic construct
  source 1..56: mol_type = other RNA
tctgaacctgaagctgctgttacctttgccaagtgttccagccaccggcccagggc

SEQ ID NO: 14237 - RNA, 56 nt, synthetic construct
  source 1..56: mol_type = other RNA
tctgaacctgaagctgctgttacctttgccaagtgttccagccaccggcctagggc

SEQ ID NO: 14238 - RNA, 56 nt, synthetic construct
  source 1..56: mol_type = other RNA
tctgaacctgaagctgctgttacctttgccaagtgttccagccaccggccaagggc

SEQ ID NO: 14239 - RNA, 56 nt, synthetic construct
  source 1..56: mol_type = other RNA
tctgaacctgaagctgctgttacctttgccaagtgttccagccaccggccgagggc

SEQ ID NO: 14240 - RNA, 57 nt, synthetic construct
  source 1..57: mol_type = other RNA
ttctgaacctgaagctgctgttacctttgccaagtgttccagccaccggcctagggc

SEQ ID NO: 14241 - RNA, 57 nt, synthetic construct
  source 1..57: mol_type = other RNA
ttctgaacctgaagctgctgttacctttgccaagtgttccagccaccggccgagggc

SEQ ID NO: 14242 - RNA, 57 nt, synthetic construct
  source 1..57: mol_type = other RNA
ttctgaacctgaagctgctgttacctttgccaagtgttccagccaccggccaagggc

SEQ ID NO: 14243 - RNA, 57 nt, synthetic construct
  source 1..57: mol_type = other RNA
ttctgaacctgaagctgctgttacctttgccaagtgttccagccaccggcccagggc

SEQ ID NO: 14244 - RNA, 57 nt, synthetic construct
  source 1..57: mol_type = other RNA
ttctgaacctgaagctgctgttacctttgccaagtgttccagccaccggcctaaggc

SEQ ID NO: 14245 - RNA, 58 nt, synthetic construct
  source 1..58: mol_type = other RNA
tttctgaacctgaagctgctgttacctttgccaagtgttccagccaccggccgagggc

SEQ ID NO: 14246 - RNA, 58 nt, synthetic construct
  source 1..58: mol_type = other RNA
tttctgaacctgaagctgctgttacctttgccaagtgttccagccaccggccaagggc

SEQ ID NO: 14247 - RNA, 58 nt, synthetic construct
  source 1..58: mol_type = other RNA
tttctgaacctgaagctgctgttacctttgccaagtgttccagccaccggcctaaggc

SEQ ID NO: 14248 - RNA, 58 nt, synthetic construct
  source 1..58: mol_type = other RNA
tttctgaacctgaagctgctgttacctttgccaagtgttccagccaccggcccagggc

SEQ ID NO: 14249 - RNA, 58 nt, synthetic construct
  source 1..58: mol_type = other RNA
tttctgaacctgaagctgctgttacctttgccaagtgttccagccaccggcctagggc

SEQ ID NO: 14250 - RNA, 59 nt, synthetic construct
  source 1..59: mol_type = other RNA
ttttctgaacctgaagctgctgttacctttgccaagtgttccagccaccggccgagggc

SEQ ID NO: 14251 - RNA, 59 nt, synthetic construct
  source 1..59: mol_type = other RNA
ttttctgaacctgaagctgctgttacctttgccaagtgttccagccaccggcctagggc

SEQ ID NO: 14252 - RNA, 59 nt, synthetic construct
  source 1..59: mol_type = other RNA
ttttctgaacctgaagctgctgttacctttgccaagtgttccagccaccggccaagggc

SEQ ID NO: 14253 - RNA, 59 nt, synthetic construct
  source 1..59: mol_type = other RNA
ttttctgaacctgaagctgctgttacctttgccaagtgttccagccaccggcctaaggc

SEQ ID NO: 14254 - RNA, 59 nt, synthetic construct
  source 1..59: mol_type = other RNA
ttttctgaacctgaagctgctgttacctttgccaagtgttccagccaccggcccagggc

SEQ ID NO: 14255 - RNA, 60 nt, synthetic construct
  source 1..60: mol_type = other RNA
cttttctgaacctgaagctgctgttacctttgccaagtgttccagccaccggccaagggc

SEQ ID NO: 14256 - RNA, 60 nt, synthetic construct
  source 1..60: mol_type = other RNA
cttttctgaacctgaagctgctgttacctttgccaagtgttccagccaccggcctagggc

SEQ ID NO: 14257 - RNA, 60 nt, synthetic construct
  source 1..60: mol_type = other RNA
cttttctgaacctgaagctgctgttacctttgccaagtgttccagccaccggcctaaggc

SEQ ID NO: 14258 - RNA, 60 nt, synthetic construct
  source 1..60: mol_type = other RNA
cttttctgaacctgaagctgctgttacctttgccaagtgttccagccaccggccgagggc

SEQ ID NO: 14259 - RNA, 60 nt, synthetic construct
  source 1..60: mol_type = other RNA
cttttctgaacctgaagctgctgttacctttgccaagtgttccagccaccggcccagggc

SEQ ID NO: 14260 - RNA, 61 nt, synthetic construct
  source 1..61: mol_type = other RNA
tcttttctgaacctgaagctgctgttacctttgccaagtgttccagccaccggcccagggc

SEQ ID NO: 14261 - RNA, 61 nt, synthetic construct
  source 1..61: mol_type = other RNA
tcttttctgaacctgaagctgctgttacctttgccaagtgttccagccaccggcctagggc

SEQ ID NO: 14262 - RNA, 61 nt, synthetic construct
  source 1..61: mol_type = other RNA
tcttttctgaacctgaagctgctgttacctttgccaagtgttccagccaccggccaagggc

SEQ ID NO: 14263 - RNA, 61 nt, synthetic construct
  source 1..61: mol_type = other RNA
tcttttctgaacctgaagctgctgttacctttgccaagtgttccagccaccggcctaaggc

SEQ ID NO: 14264 - RNA, 61 nt, synthetic construct
  source 1..61: mol_type = other RNA
tcttttctgaacctgaagctgctgttacctttgccaagtgttccagccaccggccgagggc

SEQ ID NO: 14265 - RNA, 62 nt, synthetic construct
  source 1..62: mol_type = other RNA
ctcttttctgaacctgaagctgctgttacctttgccaagtgttccagccaccggccgagggc

SEQ ID NO: 14266 - RNA, 62 nt, synthetic construct
  source 1..62: mol_type = other RNA
ctcttttctgaacctgaagctgctgttacctttgccaagtgttccagccaccggcctaaggc

SEQ ID NO: 14267 - RNA, 62 nt, synthetic construct
  source 1..62: mol_type = other RNA
ctcttttctgaacctgaagctgctgttacctttgccaagtgttccagccaccggcccagggc

SEQ ID NO: 14268 - RNA, 62 nt, synthetic construct
  source 1..62: mol_type = other RNA
ctcttttctgaacctgaagctgctgttacctttgccaagtgttccagccaccggcctagggc

SEQ ID NO: 14269 - RNA, 62 nt, synthetic construct
  source 1..62: mol_type = other RNA
ctcttttctgaacctgaagctgctgttacctttgccaagtgttccagccaccggccaagggc

SEQ ID NO: 14270 - RNA, 63 nt, synthetic construct
  source 1..63: mol_type = other RNA
gctcttttctgaacctgaagctgctgttacctttgccaagtgttccagccaccggccgagggc

SEQ ID NO: 14271 - RNA, 63 nt, synthetic construct
  source 1..63: mol_type = other RNA
gctcttttctgaacctgaagctgctgttacctttgccaagtgttccagccaccggccaagggc

SEQ ID NO: 14272 - RNA, 63 nt, synthetic construct
  source 1..63: mol_type = other RNA
gctcttttctgaacctgaagctgctgttacctttgccaagtgttccagccaccggcccagggc

SEQ ID NO: 14273 - RNA, 63 nt, synthetic construct
  source 1..63: mol_type = other RNA
gctcttttctgaacctgaagctgctgttacctttgccaagtgttccagccaccggcctaaggc

SEQ ID NO: 14274 - RNA, 63 nt, synthetic construct
  source 1..63: mol_type = other RNA
gctcttttctgaacctgaagctgctgttacctttgccaagtgttccagccaccggcctagggc

SEQ ID NO: 14275 - RNA, 64 nt, synthetic construct
  source 1..64: mol_type = other RNA
agctcttttctgaacctgaagctgctgttacctttgccaagtgttccagccaccggcctagggc

SEQ ID NO: 14276 - RNA, 64 nt, synthetic construct
  source 1..64: mol_type = other RNA
agctcttttctgaacctgaagctgctgttacctttgccaagtgttccagccaccggccaagggc

SEQ ID NO: 14277 - RNA, 64 nt, synthetic construct
  source 1..64: mol_type = other RNA
agctcttttctgaacctgaagctgctgttacctttgccaagtgttccagccaccggcccagggc

SEQ ID NO: 14278 - RNA, 64 nt, synthetic construct
  source 1..64: mol_type = other RNA
agctcttttctgaacctgaagctgctgttacctttgccaagtgttccagccaccggccgagggc

SEQ ID NO: 14279 - RNA, 64 nt, synthetic construct
  source 1..64: mol_type = other RNA
agctcttttctgaacctgaagctgctgttacctttgccaagtgttccagccaccggcctaaggc

SEQ ID NO: 14280 - RNA, 65 nt, synthetic construct
  source 1..65: mol_type = other RNA
cagctcttttctgaacctgaagctgctgttacctttgccaagtgttccagccaccggcccagggc

SEQ ID NO: 14281 - RNA, 65 nt, synthetic construct
  source 1..65: mol_type = other RNA
cagctcttttctgaacctgaagctgctgttacctttgccaagtgttccagccaccggccaagggc

SEQ ID NO: 14282 - RNA, 65 nt, synthetic construct
  source 1..65: mol_type = other RNA
cagctcttttctgaacctgaagctgctgttacctttgccaagtgttccagccaccggcctaaggc

SEQ ID NO: 14283 - RNA, 65 nt, synthetic construct
  source 1..65: mol_type = other RNA
cagctcttttctgaacctgaagctgctgttacctttgccaagtgttccagccaccggcctagggc

SEQ ID NO: 14284 - RNA, 65 nt, synthetic construct
  source 1..65: mol_type = other RNA
cagctcttttctgaacctgaagctgctgttacctttgccaagtgttccagccaccggccgagggc

SEQ ID NO: 14285 - RNA, 66 nt, synthetic construct
  source 1..66: mol_type = other RNA
gcagctcttttctgaacctgaagctgctgttacctttgccaagtgttccagccaccggccaagggc

SEQ ID NO: 14286 - RNA, 66 nt, synthetic construct
  source 1..66: mol_type = other RNA
gcagctcttttctgaacctgaagctgctgttacctttgccaagtgttccagccaccggcctagggc

SEQ ID NO: 14287 - RNA, 66 nt, synthetic construct
  source 1..66: mol_type = other RNA
gcagctcttttctgaacctgaagctgctgttacctttgccaagtgttccagccaccggcctaaggc

SEQ ID NO: 14288 - RNA, 66 nt, synthetic construct
  source 1..66: mol_type = other RNA
gcagctcttttctgaacctgaagctgctgttacctttgccaagtgttccagccaccggccgagggc

SEQ ID NO: 14289 - RNA, 66 nt, synthetic construct
  source 1..66: mol_type = other RNA
gcagctcttttctgaacctgaagctgctgttacctttgccaagtgttccagccaccggcccagggc

SEQ ID NO: 14290 - RNA, 67 nt, synthetic construct
  source 1..67: mol_type = other RNA
agcagctcttttctgaacctgaagctgctgttacctttgccaagtgttccagccaccggcctaaggc

SEQ ID NO: 14291 - RNA, 67 nt, synthetic construct
  source 1..67: mol_type = other RNA
agcagctcttttctgaacctgaagctgctgttacctttgccaagtgttccagccaccggccaagggc

SEQ ID NO: 14292 - RNA, 67 nt, synthetic construct
  source 1..67: mol_type = other RNA
agcagctcttttctgaacctgaagctgctgttacctttgccaagtgttccagccaccggcctagggc

SEQ ID NO: 14293 - RNA, 67 nt, synthetic construct
  source 1..67: mol_type = other RNA
agcagctcttttctgaacctgaagctgctgttacctttgccaagtgttccagccaccggccgagggc

SEQ ID NO: 14294 - RNA, 67 nt, synthetic construct
  source 1..67: mol_type = other RNA
agcagctcttttctgaacctgaagctgctgttacctttgccaagtgttccagccaccggcccagggc

SEQ ID NO: 14295 - RNA, 68 nt, synthetic construct
  source 1..68: mol_type = other RNA
gagcagctcttttctgaacctgaagctgctgttacctttgccaagtgttccagccaccggcccagggc

SEQ ID NO: 14296 - RNA, 68 nt, synthetic construct
  source 1..68: mol_type = other RNA
gagcagctcttttctgaacctgaagctgctgttacctttgccaagtgttccagccaccggccaagggc

SEQ ID NO: 14297 - RNA, 68 nt, synthetic construct
  source 1..68: mol_type = other RNA
gagcagctcttttctgaacctgaagctgctgttacctttgccaagtgttccagccaccggccgagggc

SEQ ID NO: 14298 - RNA, 68 nt, synthetic construct
  source 1..68: mol_type = other RNA
gagcagctcttttctgaacctgaagctgctgttacctttgccaagtgttccagccaccggcctaaggc

SEQ ID NO: 14299 - RNA, 68 nt, synthetic construct
  source 1..68: mol_type = other RNA
gagcagctcttttctgaacctgaagctgctgttacctttgccaagtgttccagccaccggcctagggc

SEQ ID NO: 14300 - RNA, 69 nt, synthetic construct
  source 1..69: mol_type = other RNA
ggagcagctcttttctgaacctgaagctgctgttacctttgccaagtgttccagccaccggcctagggc

SEQ ID NO: 14301 - RNA, 69 nt, synthetic construct
  source 1..69: mol_type = other RNA
ggagcagctcttttctgaacctgaagctgctgttacctttgccaagtgttccagccaccggccgagggc

SEQ ID NO: 14302 - RNA, 69 nt, synthetic construct
  source 1..69: mol_type = other RNA
ggagcagctcttttctgaacctgaagctgctgttacctttgccaagtgttccagccaccggccaagggc

SEQ ID NO: 14303 - RNA, 69 nt, synthetic construct
  source 1..69: mol_type = other RNA
ggagcagctcttttctgaacctgaagctgctgttacctttgccaagtgttccagccaccggcccagggc

SEQ ID NO: 14304 - RNA, 69 nt, synthetic construct
  source 1..69: mol_type = other RNA
ggagcagctcttttctgaacctgaagctgctgttacctttgccaagtgttccagccaccggcctaaggc

SEQ ID NO: 14305 - RNA, 70 nt, synthetic construct
  source 1..70: mol_type = other RNA
aggagcagctcttttctgaacctgaagctgctgttacctttgccaagtgttccagccaccggccaagggc

SEQ ID NO: 14306 - RNA, 70 nt, synthetic construct
  source 1..70: mol_type = other RNA
aggagcagctcttttctgaacctgaagctgctgttacctttgccaagtgttccagccaccggcctagggc

SEQ ID NO: 14307 - RNA, 70 nt, synthetic construct
  source 1..70: mol_type = other RNA
aggagcagctcttttctgaacctgaagctgctgttacctttgccaagtgttccagccaccggcctaaggc

SEQ ID NO: 14308 - RNA, 70 nt, synthetic construct
  source 1..70: mol_type = other RNA
aggagcagctcttttctgaacctgaagctgctgttacctttgccaagtgttccagccaccggccgagggc

SEQ ID NO: 14309 - RNA, 70 nt, synthetic construct
  source 1..70: mol_type = other RNA
aggagcagctcttttctgaacctgaagctgctgttacctttgccaagtgttccagccaccggcccagggc

SEQ ID NO: 14310 - RNA, 71 nt, synthetic construct
  source 1..71: mol_type = other RNA
aaggagcagctcttttctgaacctgaagctgctgttacctttgccaagtgttccagccaccggcctaaggc

SEQ ID NO: 14311 - RNA, 71 nt, synthetic construct
  source 1..71: mol_type = other RNA
aaggagcagctcttttctgaacctgaagctgctgttacctttgccaagtgttccagccaccggccaagggc

SEQ ID NO: 14312 - RNA, 71 nt, synthetic construct
  source 1..71: mol_type = other RNA
aaggagcagctcttttctgaacctgaagctgctgttacctttgccaagtgttccagccaccggcctagggc

SEQ ID NO: 14313 - RNA, 71 nt, synthetic construct
  source 1..71: mol_type = other RNA
aaggagcagctcttttctgaacctgaagctgctgttacctttgccaagtgttccagccaccggccgagggc

SEQ ID NO: 14314 - RNA, 71 nt, synthetic construct
  source 1..71: mol_type = other RNA
aaggagcagctcttttctgaacctgaagctgctgttacctttgccaagtgttccagccaccggcccagggc

SEQ ID NO: 14315 - RNA, 72 nt, synthetic construct
  source 1..72: mol_type = other RNA
gaaggagcagctcttttctgaacctgaagctgctgttacctttgccaagtgttccagccaccggccgagggc

SEQ ID NO: 14316 - RNA, 72 nt, synthetic construct
  source 1..72: mol_type = other RNA
gaaggagcagctcttttctgaacctgaagctgctgttacctttgccaagtgttccagccaccggcctagggc

SEQ ID NO: 14317 - RNA, 72 nt, synthetic construct
  source 1..72: mol_type = other RNA
gaaggagcagctcttttctgaacctgaagctgctgttacctttgccaagtgttccagccaccggcctaaggc

SEQ ID NO: 14318 - RNA, 72 nt, synthetic construct
  source 1..72: mol_type = other RNA
gaaggagcagctcttttctgaacctgaagctgctgttacctttgccaagtgttccagccaccggcccagggc

SEQ ID NO: 14319 - RNA, 72 nt, synthetic construct
  source 1..72: mol_type = other RNA
gaaggagcagctcttttctgaacctgaagctgctgttacctttgccaagtgttccagccaccggccaagggc

SEQ ID NO: 14320 - RNA, 73 nt, synthetic construct
  source 1..73: mol_type = other RNA
tgaaggagcagctcttttctgaacctgaagctgctgttacctttgccaagtgttccagccaccggcctaaggc

SEQ ID NO: 14321 - RNA, 73 nt, synthetic construct
  source 1..73: mol_type = other RNA
tgaaggagcagctcttttctgaacctgaagctgctgttacctttgccaagtgttccagccaccggcccagggc

SEQ ID NO: 14322 - RNA, 73 nt, synthetic construct
  source 1..73: mol_type = other RNA
tgaaggagcagctcttttctgaacctgaagctgctgttacctttgccaagtgttccagccaccggccaagggc

SEQ ID NO: 14323 - RNA, 73 nt, synthetic construct
  source 1..73: mol_type = other RNA
tgaaggagcagctcttttctgaacctgaagctgctgttacctttgccaagtgttccagccaccggcctagggc

SEQ ID NO: 14324 - RNA, 73 nt, synthetic construct
  source 1..73: mol_type = other RNA
tgaaggagcagctcttttctgaacctgaagctgctgttacctttgccaagtgttccagccaccggccgagggc

SEQ ID NO: 14325 - RNA, 74 nt, synthetic construct
  source 1..74: mol_type = other RNA
ctgaaggagcagctcttttctgaacctgaagctgctgttacctttgccaagtgttccagccaccggccgagggc

SEQ ID NO: 14326 - RNA, 74 nt, synthetic construct
  source 1..74: mol_type = other RNA
ctgaaggagcagctcttttctgaacctgaagctgctgttacctttgccaagtgttccagccaccggcccagggc

SEQ ID NO: 14327 - RNA, 74 nt, synthetic construct
  source 1..74: mol_type = other RNA
ctgaaggagcagctcttttctgaacctgaagctgctgttacctttgccaagtgttccagccaccggcctagggc

SEQ ID NO: 14328 - RNA, 74 nt, synthetic construct
  source 1..74: mol_type = other RNA
ctgaaggagcagctcttttctgaacctgaagctgctgttacctttgccaagtgttccagccaccggcctaaggc

SEQ ID NO: 14329 - RNA, 74 nt, synthetic construct
  source 1..74: mol_type = other RNA
ctgaaggagcagctcttttctgaacctgaagctgctgttacctttgccaagtgttccagccaccggccaagggc

SEQ ID NO: 14330 - RNA, 75 nt, synthetic construct
  source 1..75: mol_type = other RNA
actgaaggagcagctcttttctgaacctgaagctgctgttacctttgccaagtgttccagccaccggcctagggc

SEQ ID NO: 14331 - RNA, 75 nt, synthetic construct
  source 1..75: mol_type = other RNA
actgaaggagcagctcttttctgaacctgaagctgctgttacctttgccaagtgttccagccaccggcccagggc

SEQ ID NO: 14332 - RNA, 75 nt, synthetic construct
  source 1..75: mol_type = other RNA
actgaaggagcagctcttttctgaacctgaagctgctgttacctttgccaagtgttccagccaccggccgagggc

SEQ ID NO: 14333 - RNA, 75 nt, synthetic construct
  source 1..75: mol_type = other RNA
actgaaggagcagctcttttctgaacctgaagctgctgttacctttgccaagtgttccagccaccggcctaaggc

SEQ ID NO: 14334 - RNA, 75 nt, synthetic construct
  source 1..75: mol_type = other RNA
actgaaggagcagctcttttctgaacctgaagctgctgttacctttgccaagtgttccagccaccggccaagggc

SEQ ID NO: 14335 - RNA, 76 nt, synthetic construct
  source 1..76: mol_type = other RNA
tactgaaggagcagctcttttctgaacctgaagctgctgttacctttgccaagtgttccagccaccggcccagggc

SEQ ID NO: 14336 - RNA, 76 nt, synthetic construct
  source 1..76: mol_type = other RNA
tactgaaggagcagctcttttctgaacctgaagctgctgttacctttgccaagtgttccagccaccggccaagggc

SEQ ID NO: 14337 - RNA, 76 nt, synthetic construct
  source 1..76: mol_type = other RNA
tactgaaggagcagctcttttctgaacctgaagctgctgttacctttgccaagtgttccagccaccggccgagggc

SEQ ID NO: 14338 - RNA, 76 nt, synthetic construct
  source 1..76: mol_type = other RNA
tactgaaggagcagctcttttctgaacctgaagctgctgttacctttgccaagtgttccagccaccggcctagggc

SEQ ID NO: 14339 - RNA, 76 nt, synthetic construct
  source 1..76: mol_type = other RNA
tactgaaggagcagctcttttctgaacctgaagctgctgttacctttgccaagtgttccagccaccggcctaaggc

SEQ ID NO: 14340 - RNA, 77 nt, synthetic construct
  source 1..77: mol_type = other RNA
ttactgaaggagcagctcttttctgaacctgaagctgctgttacctttgccaagtgttccagccaccggcctaaggc

SEQ ID NO: 14341 - RNA, 77 nt, synthetic construct
  source 1..77: mol_type = other RNA
ttactgaaggagcagctcttttctgaacctgaagctgctgttacctttgccaagtgttccagccaccggccgagggc

SEQ ID NO: 14342 - RNA, 77 nt, synthetic construct
  source 1..77: mol_type = other RNA
ttactgaaggagcagctcttttctgaacctgaagctgctgttacctttgccaagtgttccagccaccggccaagggc

SEQ ID NO: 14343 - RNA, 77 nt, synthetic construct
  source 1..77: mol_type = other RNA
ttactgaaggagcagctcttttctgaacctgaagctgctgttacctttgccaagtgttccagccaccggcccagggc

SEQ ID NO: 14344 - RNA, 77 nt, synthetic construct
  source 1..77: mol_type = other RNA
ttactgaaggagcagctcttttctgaacctgaagctgctgttacctttgccaagtgttccagccaccggcctagggc

SEQ ID NO: 14345 - RNA, 78 nt, synthetic construct
  source 1..78: mol_type = other RNA
tttactgaaggagcagctcttttctgaacctgaagctgctgttacctttgccaagtgttccagccaccggcccagggc

SEQ ID NO: 14346 - RNA, 78 nt, synthetic construct
  source 1..78: mol_type = other RNA
tttactgaaggagcagctcttttctgaacctgaagctgctgttacctttgccaagtgttccagccaccggcctaaggc

SEQ ID NO: 14347 - RNA, 78 nt, synthetic construct
  source 1..78: mol_type = other RNA
tttactgaaggagcagctcttttctgaacctgaagctgctgttacctttgccaagtgttccagccaccggccgagggc

SEQ ID NO: 14348 - RNA, 78 nt, synthetic construct
  source 1..78: mol_type = other RNA
tttactgaaggagcagctcttttctgaacctgaagctgctgttacctttgccaagtgttccagccaccggccaagggc

SEQ ID NO: 14349 - RNA, 78 nt, synthetic construct
  source 1..78: mol_type = other RNA
tttactgaaggagcagctcttttctgaacctgaagctgctgttacctttgccaagtgttccagccaccggcctagggc

SEQ ID NO: 14350 - RNA, 79 nt, synthetic construct
  source 1..79: mol_type = other RNA
gtttactgaaggagcagctcttttctgaacctgaagctgctgttacctttgccaagtgttccagccaccggcctaaggc

SEQ ID NO: 14351 - RNA, 79 nt, synthetic construct
  source 1..79: mol_type = other RNA
gtttactgaaggagcagctcttttctgaacctgaagctgctgttacctttgccaagtgttccagccaccggcctagggc

SEQ ID NO: 14352 - RNA, 79 nt, synthetic construct
  source 1..79: mol_type = other RNA
gtttactgaaggagcagctcttttctgaacctgaagctgctgttacctttgccaagtgttccagccaccggccgagggc

SEQ ID NO: 14353 - RNA, 79 nt, synthetic construct
  source 1..79: mol_type = other RNA
gtttactgaaggagcagctcttttctgaacctgaagctgctgttacctttgccaagtgttccagccaccggccaagggc

SEQ ID NO: 14354 - RNA, 79 nt, synthetic construct
  source 1..79: mol_type = other RNA
gtttactgaaggagcagctcttttctgaacctgaagctgctgttacctttgccaagtgttccagccaccggcccagggc

SEQ ID NO: 14355 - RNA, 80 nt, synthetic construct
  source 1..80: mol_type = other RNA
tgtttactgaaggagcagctcttttctgaacctgaagctgctgttacctttgccaagtgttccagccaccggcctaaggc

SEQ ID NO: 14356 - RNA, 80 nt, synthetic construct
  source 1..80: mol_type = other RNA
tgtttactgaaggagcagctcttttctgaacctgaagctgctgttacctttgccaagtgttccagccaccggcccagggc

SEQ ID NO: 14357 - RNA, 80 nt, synthetic construct
  source 1..80: mol_type = other RNA
tgtttactgaaggagcagctcttttctgaacctgaagctgctgttacctttgccaagtgttccagccaccggccgagggc

SEQ ID NO: 14358 - RNA, 80 nt, synthetic construct
  source 1..80: mol_type = other RNA
tgtttactgaaggagcagctcttttctgaacctgaagctgctgttacctttgccaagtgttccagccaccggcctagggc

SEQ ID NO: 14359 - RNA, 80 nt, synthetic construct
  source 1..80: mol_type = other RNA
tgtttactgaaggagcagctcttttctgaacctgaagctgctgttacctttgccaagtgttccagccaccggccaagggc

SEQ ID NO: 14360 - RNA, 81 nt, synthetic construct
  source 1..81: mol_type = other RNA
ttgtttactgaaggagcagctcttttctgaacctgaagctgctgttacctttgccaagtgttccagccaccggcctagggc

SEQ ID NO: 14361 - RNA, 81 nt, synthetic construct
  source 1..81: mol_type = other RNA
ttgtttactgaaggagcagctcttttctgaacctgaagctgctgttacctttgccaagtgttccagccaccggccgagggc

SEQ ID NO: 14362 - RNA, 81 nt, synthetic construct
  source 1..81: mol_type = other RNA
ttgtttactgaaggagcagctcttttctgaacctgaagctgctgttacctttgccaagtgttccagccaccggcctaaggc

SEQ ID NO: 14363 - RNA, 81 nt, synthetic construct
  source 1..81: mol_type = other RNA
ttgtttactgaaggagcagctcttttctgaacctgaagctgctgttacctttgccaagtgttccagccaccggcccagggc

SEQ ID NO: 14364 - RNA, 81 nt, synthetic construct
  source 1..81: mol_type = other RNA
ttgtttactgaaggagcagctcttttctgaacctgaagctgctgttacctttgccaagtgttccagccaccggccaagggc

SEQ ID NO: 14365 - RNA, 82 nt, synthetic construct
  source 1..82: mol_type = other RNA
tttgtttactgaaggagcagctcttttctgaacctgaagctgctgttacctttgccaagtgttccagccaccggcctagggc

SEQ ID NO: 14366 - RNA, 82 nt, synthetic construct
  source 1..82: mol_type = other RNA
tttgtttactgaaggagcagctcttttctgaacctgaagctgctgttacctttgccaagtgttccagccaccggcccagggc

SEQ ID NO: 14367 - RNA, 82 nt, synthetic construct
  source 1..82: mol_type = other RNA
tttgtttactgaaggagcagctcttttctgaacctgaagctgctgttacctttgccaagtgttccagccaccggccaagggc

SEQ ID NO: 14368 - RNA, 82 nt, synthetic construct
  source 1..82: mol_type = other RNA
tttgtttactgaaggagcagctcttttctgaacctgaagctgctgttacctttgccaagtgttccagccaccggcctaaggc

SEQ ID NO: 14369 - RNA, 82 nt, synthetic construct
  source 1..82: mol_type = other RNA
tttgtttactgaaggagcagctcttttctgaacctgaagctgctgttacctttgccaagtgttccagccaccggccgagggc

SEQ ID NO: 14370 - RNA, 83 nt, synthetic construct
  source 1..83: mol_type = other RNA
atttgtttactgaaggagcagctcttttctgaacctgaagctgctgttacctttgccaagtgttccagccaccggcctaaggc

SEQ ID NO: 14371 - RNA, 83 nt, synthetic construct
  source 1..83: mol_type = other RNA
atttgtttactgaaggagcagctcttttctgaacctgaagctgctgttacctttgccaagtgttccagccaccggcctagggc

SEQ ID NO: 14372 - RNA, 83 nt, synthetic construct
  source 1..83: mol_type = other RNA
atttgtttactgaaggagcagctcttttctgaacctgaagctgctgttacctttgccaagtgttccagccaccggccaagggc

SEQ ID NO: 14373 - RNA, 83 nt, synthetic construct
  source 1..83: mol_type = other RNA
atttgtttactgaaggagcagctcttttctgaacctgaagctgctgttacctttgccaagtgttccagccaccggcccagggc

SEQ ID NO: 14374 - RNA, 83 nt, synthetic construct
  source 1..83: mol_type = other RNA
atttgtttactgaaggagcagctcttttctgaacctgaagctgctgttacctttgccaagtgttccagccaccggccgagggc

SEQ ID NO: 14375 - RNA, 84 nt, synthetic construct
  source 1..84: mol_type = other RNA
gatttgtttactgaaggagcagctcttttctgaacctgaagctgctgttacctttgccaagtgttccagccaccggcctaaggc

SEQ ID NO: 14376 - RNA, 84 nt, synthetic construct
  source 1..84: mol_type = other RNA
gatttgtttactgaaggagcagctcttttctgaacctgaagctgctgttacctttgccaagtgttccagccaccggcccagggc

SEQ ID NO: 14377 - RNA, 84 nt, synthetic construct
  source 1..84: mol_type = other RNA
gatttgtttactgaaggagcagctcttttctgaacctgaagctgctgttacctttgccaagtgttccagccaccggcctagggc

SEQ ID NO: 14378 - RNA, 84 nt, synthetic construct
  source 1..84: mol_type = other RNA
gatttgtttactgaaggagcagctcttttctgaacctgaagctgctgttacctttgccaagtgttccagccaccggccaagggc

SEQ ID NO: 14379 - RNA, 84 nt, synthetic construct
  source 1..84: mol_type = other RNA
gatttgtttactgaaggagcagctcttttctgaacctgaagctgctgttacctttgccaagtgttccagccaccggccgagggc

SEQ ID NO: 14380 - RNA, 85 nt, synthetic construct
  source 1..85: mol_type = other RNA
agatttgtttactgaaggagcagctcttttctgaacctgaagctgctgttacctttgccaagtgttccagccaccggccaagggc

SEQ ID NO: 14381 - RNA, 85 nt, synthetic construct
  source 1..85: mol_type = other RNA
agatttgtttactgaaggagcagctcttttctgaacctgaagctgctgttacctttgccaagtgttccagccaccggcctaaggc

SEQ ID NO: 14382 - RNA, 85 nt, synthetic construct
  source 1..85: mol_type = other RNA
agatttgtttactgaaggagcagctcttttctgaacctgaagctgctgttacctttgccaagtgttccagccaccggccgagggc

SEQ ID NO: 14383 - RNA, 85 nt, synthetic construct
  source 1..85: mol_type = other RNA
agatttgtttactgaaggagcagctcttttctgaacctgaagctgctgttacctttgccaagtgttccagccaccggcccagggc

SEQ ID NO: 14384 - RNA, 85 nt, synthetic construct
  source 1..85: mol_type = other RNA
agatttgtttactgaaggagcagctcttttctgaacctgaagctgctgttacctttgccaagtgttccagccaccggcctagggc

SEQ ID NO: 14385 - RNA, 86 nt, synthetic construct
  source 1..86: mol_type = other RNA
gagatttgtttactgaaggagcagctcttttctgaacctgaagctgctgttacctttgccaagtgttccagccaccggcctagggc

SEQ ID NO: 14386 - RNA, 86 nt, synthetic construct
  source 1..86: mol_type = other RNA
gagatttgtttactgaaggagcagctcttttctgaacctgaagctgctgttacctttgccaagtgttccagccaccggcctaaggc

SEQ ID NO: 14387 - RNA, 86 nt, synthetic construct
  source 1..86: mol_type = other RNA
gagatttgtttactgaaggagcagctcttttctgaacctgaagctgctgttacctttgccaagtgttccagccaccggccaagggc

SEQ ID NO: 14388 - RNA, 86 nt, synthetic construct
  source 1..86: mol_type = other RNA
gagatttgtttactgaaggagcagctcttttctgaacctgaagctgctgttacctttgccaagtgttccagccaccggcccagggc

SEQ ID NO: 14389 - RNA, 86 nt, synthetic construct
  source 1..86: mol_type = other RNA
gagatttgtttactgaaggagcagctcttttctgaacctgaagctgctgttacctttgccaagtgttccagccaccggccgagggc

SEQ ID NO: 14390 - RNA, 87 nt, synthetic construct
  source 1..87: mol_type = other RNA
tgagatttgtttactgaaggagcagctcttttctgaacctgaagctgctgttacctttgccaagtgttccagccaccggccaagggc

SEQ ID NO: 14391 - RNA, 87 nt, synthetic construct
  source 1..87: mol_type = other RNA
tgagatttgtttactgaaggagcagctcttttctgaacctgaagctgctgttacctttgccaagtgttccagccaccggcctagggc

SEQ ID NO: 14392 - RNA, 87 nt, synthetic construct
  source 1..87: mol_type = other RNA
tgagatttgtttactgaaggagcagctcttttctgaacctgaagctgctgttacctttgccaagtgttccagccaccggcccagggc

SEQ ID NO: 14393 - RNA, 87 nt, synthetic construct
  source 1..87: mol_type = other RNA
tgagatttgtttactgaaggagcagctcttttctgaacctgaagctgctgttacctttgccaagtgttccagccaccggccgagggc

SEQ ID NO: 14394 - RNA, 87 nt, synthetic construct
  source 1..87: mol_type = other RNA
tgagatttgtttactgaaggagcagctcttttctgaacctgaagctgctgttacctttgccaagtgttccagccaccggcctaaggc

SEQ ID NO: 14395 - RNA, 88 nt, synthetic construct
  source 1..88: mol_type = other RNA
gtgagatttgtttactgaaggagcagctcttttctgaacctgaagctgctgttacctttgccaagtgttccagccaccggccaagggc

SEQ ID NO: 14396 - RNA, 88 nt, synthetic construct
  source 1..88: mol_type = other RNA
gtgagatttgtttactgaaggagcagctcttttctgaacctgaagctgctgttacctttgccaagtgttccagccaccggcctaaggc

SEQ ID NO: 14397 - RNA, 88 nt, synthetic construct
  source 1..88: mol_type = other RNA
gtgagatttgtttactgaaggagcagctcttttctgaacctgaagctgctgttacctttgccaagtgttccagccaccggccgagggc

SEQ ID NO: 14398 - RNA, 88 nt, synthetic construct
  source 1..88: mol_type = other RNA
gtgagatttgtttactgaaggagcagctcttttctgaacctgaagctgctgttacctttgccaagtgttccagccaccggcccagggc

SEQ ID NO: 14399 - RNA, 88 nt, synthetic construct
  source 1..88: mol_type = other RNA
gtgagatttgtttactgaaggagcagctcttttctgaacctgaagctgctgttacctttgccaagtgttccagccaccggcctagggc

SEQ ID NO: 14400 - RNA, 89 nt, synthetic construct
  source 1..89: mol_type = other RNA
agtgagatttgtttactgaaggagcagctcttttctgaacctgaagctgctgttacctttgccaagtgttccagccaccggccaagggc

SEQ ID NO: 14401 - RNA, 89 nt, synthetic construct
  source 1..89: mol_type = other RNA
agtgagatttgtttactgaaggagcagctcttttctgaacctgaagctgctgttacctttgccaagtgttccagccaccggccgagggc

SEQ ID NO: 14402 - RNA, 89 nt, synthetic construct
  source 1..89: mol_type = other RNA
agtgagatttgtttactgaaggagcagctcttttctgaacctgaagctgctgttacctttgccaagtgttccagccaccggcctaaggc

SEQ ID NO: 14403 - RNA, 89 nt, synthetic construct
  source 1..89: mol_type = other RNA
agtgagatttgtttactgaaggagcagctcttttctgaacctgaagctgctgttacctttgccaagtgttccagccaccggcccagggc

SEQ ID NO: 14404 - RNA, 89 nt, synthetic construct
  source 1..89: mol_type = other RNA
agtgagatttgtttactgaaggagcagctcttttctgaacctgaagctgctgttacctttgccaagtgttccagccaccggcctagggc

SEQ ID NO: 14405 - RNA, 90 nt, synthetic construct
  source 1..90: mol_type = other RNA
aagtgagatttgtttactgaaggagcagctcttttctgaacctgaagctgctgttacctttgccaagtgttccagccaccggcctagggc

SEQ ID NO: 14406 - RNA, 90 nt, synthetic construct
  source 1..90: mol_type = other RNA
aagtgagatttgtttactgaaggagcagctcttttctgaacctgaagctgctgttacctttgccaagtgttccagccaccggccaagggc

SEQ ID NO: 14407 - RNA, 90 nt, synthetic construct
  source 1..90: mol_type = other RNA
aagtgagatttgtttactgaaggagcagctcttttctgaacctgaagctgctgttacctttgccaagtgttccagccaccggcccagggc

SEQ ID NO: 14408 - RNA, 90 nt, synthetic construct
  source 1..90: mol_type = other RNA
aagtgagatttgtttactgaaggagcagctcttttctgaacctgaagctgctgttacctttgccaagtgttccagccaccggccgagggc

SEQ ID NO: 14409 - RNA, 90 nt, synthetic construct
  source 1..90: mol_type = other RNA
aagtgagatttgtttactgaaggagcagctcttttctgaacctgaagctgctgttacctttgccaagtgttccagccaccggcctaaggc

SEQ ID NO: 14410 - RNA, 91 nt, synthetic construct
  source 1..91: mol_type = other RNA
gaagtgagatttgtttactgaaggagcagctcttttctgaacctgaagctgctgttacctttgccaagtgttccagccaccggcctagggc

SEQ ID NO: 14411 - RNA, 91 nt, synthetic construct
  source 1..91: mol_type = other RNA
gaagtgagatttgtttactgaaggagcagctcttttctgaacctgaagctgctgttacctttgccaagtgttccagccaccggccgagggc

SEQ ID NO: 14412 - RNA, 91 nt, synthetic construct
  source 1..91: mol_type = other RNA
gaagtgagatttgtttactgaaggagcagctcttttctgaacctgaagctgctgttacctttgccaagtgttccagccaccggcccagggc

SEQ ID NO: 14413 - RNA, 91 nt, synthetic construct
  source 1..91: mol_type = other RNA
gaagtgagatttgtttactgaaggagcagctcttttctgaacctgaagctgctgttacctttgccaagtgttccagccaccggcctaaggc

SEQ ID NO: 14414 - RNA, 91 nt, synthetic construct
  source 1..91: mol_type = other RNA
gaagtgagatttgtttactgaaggagcagctcttttctgaacctgaagctgctgttacctttgccaagtgttccagccaccggccaagggc

SEQ ID NO: 14415 - RNA, 92 nt, synthetic construct
  source 1..92: mol_type = other RNA
ggaagtgagatttgtttactgaaggagcagctcttttctgaacctgaagctgctgttacctttgccaagtgttccagccaccggccaagggc

SEQ ID NO: 14416 - RNA, 92 nt, synthetic construct
  source 1..92: mol_type = other RNA
ggaagtgagatttgtttactgaaggagcagctcttttctgaacctgaagctgctgttacctttgccaagtgttccagccaccggcctaaggc

SEQ ID NO: 14417 - RNA, 92 nt, synthetic construct
  source 1..92: mol_type = other RNA
ggaagtgagatttgtttactgaaggagcagctcttttctgaacctgaagctgctgttacctttgccaagtgttccagccaccggcccagggc

SEQ ID NO: 14418 - RNA, 92 nt, synthetic construct
  source 1..92: mol_type = other RNA
ggaagtgagatttgtttactgaaggagcagctcttttctgaacctgaagctgctgttacctttgccaagtgttccagccaccggccgagggc

SEQ ID NO: 14419 - RNA, 92 nt, synthetic construct
  source 1..92: mol_type = other RNA
ggaagtgagatttgtttactgaaggagcagctcttttctgaacctgaagctgctgttacctttgccaagtgttccagccaccggcctagggc

SEQ ID NO: 14420 - RNA, 93 nt, synthetic construct
  source 1..93: mol_type = other RNA
aggaagtgagatttgtttactgaaggagcagctcttttctgaacctgaagctgctgttacctttgccaagtgttccagccaccggcctagggc

SEQ ID NO: 14421 - RNA, 93 nt, synthetic construct
  source 1..93: mol_type = other RNA
aggaagtgagatttgtttactgaaggagcagctcttttctgaacctgaagctgctgttacctttgccaagtgttccagccaccggcctaaggc

SEQ ID NO: 14422 - RNA, 93 nt, synthetic construct
  source 1..93: mol_type = other RNA
aggaagtgagatttgtttactgaaggagcagctcttttctgaacctgaagctgctgttacctttgccaagtgttccagccaccggccgagggc

SEQ ID NO: 14423 - RNA, 93 nt, synthetic construct
  source 1..93: mol_type = other RNA
aggaagtgagatttgtttactgaaggagcagctcttttctgaacctgaagctgctgttacctttgccaagtgttccagccaccggccaagggc

SEQ ID NO: 14424 - RNA, 93 nt, synthetic construct
  source 1..93: mol_type = other RNA
aggaagtgagatttgtttactgaaggagcagctcttttctgaacctgaagctgctgttacctttgccaagtgttccagccaccggcccagggc

SEQ ID NO: 14425 - RNA, 94 nt, synthetic construct
  source 1..94: mol_type = other RNA
gaggaagtgagatttgtttactgaaggagcagctcttttctgaacctgaagctgctgttacctttgccaagtgttccagccaccggcctaaggc

SEQ ID NO: 14426 - RNA, 94 nt, synthetic construct
  source 1..94: mol_type = other RNA
gaggaagtgagatttgtttactgaaggagcagctcttttctgaacctgaagctgctgttacctttgccaagtgttccagccaccggcctagggc

SEQ ID NO: 14427 - RNA, 94 nt, synthetic construct
  source 1..94: mol_type = other RNA
gaggaagtgagatttgtttactgaaggagcagctcttttctgaacctgaagctgctgttacctttgccaagtgttccagccaccggccaagggc

SEQ ID NO: 14428 - RNA, 94 nt, synthetic construct
  source 1..94: mol_type = other RNA
gaggaagtgagatttgtttactgaaggagcagctcttttctgaacctgaagctgctgttacctttgccaagtgttccagccaccggccgagggc

SEQ ID NO: 14429 - RNA, 94 nt, synthetic construct
  source 1..94: mol_type = other RNA
gaggaagtgagatttgtttactgaaggagcagctcttttctgaacctgaagctgctgttacctttgccaagtgttccagccaccggcccagggc

SEQ ID NO: 14430 - RNA, 95 nt, synthetic construct
  source 1..95: mol_type = other RNA
agaggaagtgagatttgtttactgaaggagcagctcttttctgaacctgaagctgctgttacctttgccaagtgttccagccaccggcctagggc

SEQ ID NO: 14431 - RNA, 95 nt, synthetic construct
  source 1..95: mol_type = other RNA
agaggaagtgagatttgtttactgaaggagcagctcttttctgaacctgaagctgctgttacctttgccaagtgttccagccaccggcccagggc

SEQ ID NO: 14432 - RNA, 95 nt, synthetic construct
  source 1..95: mol_type = other RNA
agaggaagtgagatttgtttactgaaggagcagctcttttctgaacctgaagctgctgttacctttgccaagtgttccagccaccggccaagggc

SEQ ID NO: 14433 - RNA, 95 nt, synthetic construct
  source 1..95: mol_type = other RNA
agaggaagtgagatttgtttactgaaggagcagctcttttctgaacctgaagctgctgttacctttgccaagtgttccagccaccggcctaaggc

SEQ ID NO: 14434 - RNA, 95 nt, synthetic construct
  source 1..95: mol_type = other RNA
agaggaagtgagatttgtttactgaaggagcagctcttttctgaacctgaagctgctgttacctttgccaagtgttccagccaccggccgagggc

SEQ ID NO: 14435 - RNA, 96 nt, synthetic construct
  source 1..96: mol_type = other RNA
cagaggaagtgagatttgtttactgaaggagcagctcttttctgaacctgaagctgctgttacctttgccaagtgttccagccaccggccgagggc

SEQ ID NO: 14436 - RNA, 96 nt, synthetic construct
  source 1..96: mol_type = other RNA
cagaggaagtgagatttgtttactgaaggagcagctcttttctgaacctgaagctgctgttacctttgccaagtgttccagccaccggcccagggc

SEQ ID NO: 14437 - RNA, 96 nt, synthetic construct
  source 1..96: mol_type = other RNA
cagaggaagtgagatttgtttactgaaggagcagctcttttctgaacctgaagctgctgttacctttgccaagtgttccagccaccggcctagggc

SEQ ID NO: 14438 - RNA, 96 nt, synthetic construct
  source 1..96: mol_type = other RNA
cagaggaagtgagatttgtttactgaaggagcagctcttttctgaacctgaagctgctgttacctttgccaagtgttccagccaccggcctaaggc

SEQ ID NO: 14439 - RNA, 96 nt, synthetic construct
  source 1..96: mol_type = other RNA
cagaggaagtgagatttgtttactgaaggagcagctcttttctgaacctgaagctgctgttacctttgccaagtgttccagccaccggccaagggc

SEQ ID NO: 14440 - RNA, 97 nt, synthetic construct
  source 1..97: mol_type = other RNA
tcagaggaagtgagatttgtttactgaaggagcagctcttttctgaacctgaagctgctgttacctttgccaagtgttccagccaccggccaagggc

SEQ ID NO: 14441 - RNA, 97 nt, synthetic construct
  source 1..97: mol_type = other RNA
tcagaggaagtgagatttgtttactgaaggagcagctcttttctgaacctgaagctgctgttacctttgccaagtgttccagccaccggcctagggc

SEQ ID NO: 14442 - RNA, 97 nt, synthetic construct
  source 1..97: mol_type = other RNA
tcagaggaagtgagatttgtttactgaaggagcagctcttttctgaacctgaagctgctgttacctttgccaagtgttccagccaccggcccagggc

SEQ ID NO: 14443 - RNA, 97 nt, synthetic construct
  source 1..97: mol_type = other RNA
tcagaggaagtgagatttgtttactgaaggagcagctcttttctgaacctgaagctgctgttacctttgccaagtgttccagccaccggcctaaggc

SEQ ID NO: 14444 - RNA, 97 nt, synthetic construct
  source 1..97: mol_type = other RNA
tcagaggaagtgagatttgtttactgaaggagcagctcttttctgaacctgaagctgctgttacctttgccaagtgttccagccaccggccgagggc

SEQ ID NO: 14445 - RNA, 98 nt, synthetic construct
  source 1..98: mol_type = other RNA
ttcagaggaagtgagatttgtttactgaaggagcagctcttttctgaacctgaagctgctgttacctttgccaagtgttccagccaccggccgagggc

SEQ ID NO: 14446 - RNA, 98 nt, synthetic construct
  source 1..98: mol_type = other RNA
ttcagaggaagtgagatttgtttactgaaggagcagctcttttctgaacctgaagctgctgttacctttgccaagtgttccagccaccggcccagggc

SEQ ID NO: 14447 - RNA, 98 nt, synthetic construct
  source 1..98: mol_type = other RNA
ttcagaggaagtgagatttgtttactgaaggagcagctcttttctgaacctgaagctgctgttacctttgccaagtgttccagccaccggccaagggc

SEQ ID NO: 14448 - RNA, 98 nt, synthetic construct
  source 1..98: mol_type = other RNA
ttcagaggaagtgagatttgtttactgaaggagcagctcttttctgaacctgaagctgctgttacctttgccaagtgttccagccaccggcctagggc

SEQ ID NO: 14449 - RNA, 98 nt, synthetic construct
  source 1..98: mol_type = other RNA
ttcagaggaagtgagatttgtttactgaaggagcagctcttttctgaacctgaagctgctgttacctttgccaagtgttccagccaccggcctaaggc

SEQ ID NO: 14450 - RNA, 99 nt, synthetic construct
  source 1..99: mol_type = other RNA
gttcagaggaagtgagatttgtttactgaaggagcagctcttttctgaacctgaagctgctgttacctttgccaagtgttccagccaccggcctagggc

SEQ ID NO: 14451 - RNA, 99 nt, synthetic construct
  source 1..99: mol_type = other RNA
gttcagaggaagtgagatttgtttactgaaggagcagctcttttctgaacctgaagctgctgttacctttgccaagtgttccagccaccggccaagggc

SEQ ID NO: 14452 - RNA, 99 nt, synthetic construct
  source 1..99: mol_type = other RNA
gttcagaggaagtgagatttgtttactgaaggagcagctcttttctgaacctgaagctgctgttacctttgccaagtgttccagccaccggccgagggc

SEQ ID NO: 14453 - RNA, 99 nt, synthetic construct
  source 1..99: mol_type = other RNA
gttcagaggaagtgagatttgtttactgaaggagcagctcttttctgaacctgaagctgctgttacctttgccaagtgttccagccaccggcccagggc

SEQ ID NO: 14454 - RNA, 99 nt, synthetic construct
  source 1..99: mol_type = other RNA
gttcagaggaagtgagatttgtttactgaaggagcagctcttttctgaacctgaagctgctgttacctttgccaagtgttccagccaccggcctaaggc

SEQ ID NO: 14455 - RNA, 100 nt, synthetic construct
  source 1..100: mol_type = other RNA
tgttcagaggaagtgagatttgtttactgaaggagcagctcttttctgaacctgaagctgctgttacctttgccaagtgttccagccaccggcctagggc

SEQ ID NO: 14456 - RNA, 100 nt, synthetic construct
  source 1..100: mol_type = other RNA
tgttcagaggaagtgagatttgtttactgaaggagcagctcttttctgaacctgaagctgctgttacctttgccaagtgttccagccaccggccaagggc

SEQ ID NO: 14457 - RNA, 100 nt, synthetic construct
  source 1..100: mol_type = other RNA
tgttcagaggaagtgagatttgtttactgaaggagcagctcttttctgaacctgaagctgctgttacctttgccaagtgttccagccaccggccgagggc

SEQ ID NO: 14458 - RNA, 100 nt, synthetic construct
  source 1..100: mol_type = other RNA
tgttcagaggaagtgagatttgtttactgaaggagcagctcttttctgaacctgaagctgctgttacctttgccaagtgttccagccaccggcccagggc

SEQ ID NO: 14459 - RNA, 100 nt, synthetic construct
  source 1..100: mol_type = other RNA
tgttcagaggaagtgagatttgtttactgaaggagcagctcttttctgaacctgaagctgctgttacctttgccaagtgttccagccaccggcctaaggc

SEQ ID NO: 14460 - RNA, 16 nt, synthetic construct
  source 1..16: mol_type = other RNA
tcattgccctgggcct

SEQ ID NO: 14461 - RNA, 17 nt, synthetic construct
  source 1..17: mol_type = other RNA
ttcattgccctgggcct

SEQ ID NO: 14462 - RNA, 18 nt, synthetic construct
  source 1..18: mol_type = other RNA
gttcattgccctgggcct

SEQ ID NO: 14463 - RNA, 19 nt, synthetic construct
  source 1..19: mol_type = other RNA
tgttcattgccctgggcct

SEQ ID NO: 14464 - RNA, 20 nt, synthetic construct
  source 1..20: mol_type = other RNA
gtgttcattgccctgggcct

SEQ ID NO: 14465 - RNA, 21 nt, synthetic construct
  source 1..21: mol_type = other RNA
tgtgttcattgccctgggcct

SEQ ID NO: 14466 - RNA, 22 nt, synthetic construct
  source 1..22: mol_type = other RNA
ttgtgttcattgccctgggcct

SEQ ID NO: 14467-14473 - skipped (7 entries)

SEQ ID NO: 14474 - RNA, 10 nt, synthetic construct
  source 1..10: mol_type = other RNA
cccagggcaa

SEQ ID NO: 14475 - RNA, 11 nt, synthetic construct
  source 1..11: mol_type = other RNA
cccagggcaat

SEQ ID NO: 14476 - RNA, 12 nt, synthetic construct
  source 1..12: mol_type = other RNA
cccagggcaatg

SEQ ID NO: 14477 - RNA, 13 nt, synthetic construct
  source 1..13: mol_type = other RNA
cccagggcaatga

SEQ ID NO: 14478 - RNA, 14 nt, synthetic construct
  source 1..14: mol_type = other RNA
cccagggcaatgaa

SEQ ID NO: 14479 - RNA, 15 nt, synthetic construct
  source 1..15: mol_type = other RNA
cccagggcaatgaac

SEQ ID NO: 14480 - RNA, 16 nt, synthetic construct
  source 1..16: mol_type = other RNA
cccagggcaatgaaca

SEQ ID NO: 14481 - RNA, 17 nt, synthetic construct
  source 1..17: mol_type = other RNA
cccagggcaatgaacac

SEQ ID NO: 14482 - RNA, 18 nt, synthetic construct
  source 1..18: mol_type = other RNA
cccagggcaatgaacaca

SEQ ID NO: 14483 - RNA, 19 nt, synthetic construct
  source 1..19: mol_type = other RNA
cccagggcaatgaacacaa

SEQ ID NO: 14484 - RNA, 10 nt, synthetic construct
  source 1..10: mol_type = other RNA
cagccaccgg

SEQ ID NO: 14485 - RNA, 11 nt, synthetic construct
  source 1..11: mol_type = other RNA
ccagccaccgg

SEQ ID NO: 14486 - RNA, 12 nt, synthetic construct
  source 1..12: mol_type = other RNA
tccagccaccgg

SEQ ID NO: 14487 - RNA, 13 nt, synthetic construct
  source 1..13: mol_type = other RNA
ttccagccaccgg

SEQ ID NO: 14488 - RNA, 14 nt, synthetic construct
  source 1..14: mol_type = other RNA
gttccagccaccgg

SEQ ID NO: 14489 - RNA, 15 nt, synthetic construct
  source 1..15: mol_type = other RNA
tgttccagccaccgg

SEQ ID NO: 14490 - RNA, 16 nt, synthetic construct
  source 1..16: mol_type = other RNA
gtgttccagccaccgg

SEQ ID NO: 14491 - RNA, 17 nt, synthetic construct
  source 1..17: mol_type = other RNA
agtgttccagccaccgg

SEQ ID NO: 14492 - RNA, 18 nt, synthetic construct
  source 1..18: mol_type = other RNA
aagtgttccagccaccgg

SEQ ID NO: 14493 - RNA, 19 nt, synthetic construct
  source 1..19: mol_type = other RNA
caagtgttccagccaccgg

SEQ ID NO: 14494 - RNA, 20 nt, synthetic construct
  source 1..20: mol_type = other RNA
ccaagtgttccagccaccgg

SEQ ID NO: 14495 - RNA, 21 nt, synthetic construct
  source 1..21: mol_type = other RNA
gccaagtgttccagccaccgg

SEQ ID NO: 14496 - RNA, 22 nt, synthetic construct
  source 1..22: mol_type = other RNA
tgccaagtgttccagccaccgg

SEQ ID NO: 14497 - RNA, 23 nt, synthetic construct
  source 1..23: mol_type = other RNA
ttgccaagtgttccagccaccgg

SEQ ID NO: 14498 - RNA, 24 nt, synthetic construct
  source 1..24: mol_type = other RNA
tttgccaagtgttccagccaccgg

SEQ ID NO: 14499 - RNA, 25 nt, synthetic construct
  source 1..25: mol_type = other RNA
ctttgccaagtgttccagccaccgg

SEQ ID NO: 14500 - RNA, 26 nt, synthetic construct
  source 1..26: mol_type = other RNA
cctttgccaagtgttccagccaccgg

SEQ ID NO: 14501 - RNA, 27 nt, synthetic construct
  source 1..27: mol_type = other RNA
acctttgccaagtgttccagccaccgg

SEQ ID NO: 14502 - RNA, 28 nt, synthetic construct
  source 1..28: mol_type = other RNA
tacctttgccaagtgttccagccaccgg

SEQ ID NO: 14503 - RNA, 29 nt, synthetic construct
  source 1..29: mol_type = other RNA
ttacctttgccaagtgttccagccaccgg

SEQ ID NO: 14504 - RNA, 30 nt, synthetic construct
  source 1..30: mol_type = other RNA
gttacctttgccaagtgttccagccaccgg

SEQ ID NO: 14505 - RNA, 31 nt, synthetic construct
  source 1..31: mol_type = other RNA
tgttacctttgccaagtgttccagccaccgg

SEQ ID NO: 14506 - RNA, 32 nt, synthetic construct
  source 1..32: mol_type = other RNA
ctgttacctttgccaagtgttccagccaccgg

SEQ ID NO: 14507 - RNA, 33 nt, synthetic construct
  source 1..33: mol_type = other RNA
gctgttacctttgccaagtgttccagccaccgg

SEQ ID NO: 14508 - RNA, 34 nt, synthetic construct
  source 1..34: mol_type = other RNA
tgctgttacctttgccaagtgttccagccaccgg

SEQ ID NO: 14509 - RNA, 35 nt, synthetic construct
  source 1..35: mol_type = other RNA
ctgctgttacctttgccaagtgttccagccaccgg

SEQ ID NO: 14510 - RNA, 36 nt, synthetic construct
  source 1..36: mol_type = other RNA
gctgctgttacctttgccaagtgttccagccaccgg

SEQ ID NO: 14511 - RNA, 37 nt, synthetic construct
  source 1..37: mol_type = other RNA
agctgctgttacctttgccaagtgttccagccaccgg

SEQ ID NO: 14512 - RNA, 38 nt, synthetic construct
  source 1..38: mol_type = other RNA
aagctgctgttacctttgccaagtgttccagccaccgg

SEQ ID NO: 14513 - RNA, 39 nt, synthetic construct
  source 1..39: mol_type = other RNA
gaagctgctgttacctttgccaagtgttccagccaccgg

SEQ ID NO: 14514 - RNA, 40 nt, synthetic construct
  source 1..40: mol_type = other RNA
tgaagctgctgttacctttgccaagtgttccagccaccgg

SEQ ID NO: 14515 - RNA, 41 nt, synthetic construct
  source 1..41: mol_type = other RNA
ctgaagctgctgttacctttgccaagtgttccagccaccgg

SEQ ID NO: 14516 - RNA, 42 nt, synthetic construct
  source 1..42: mol_type = other RNA
cctgaagctgctgttacctttgccaagtgttccagccaccgg

SEQ ID NO: 14517 - RNA, 43 nt, synthetic construct
  source 1..43: mol_type = other RNA
acctgaagctgctgttacctttgccaagtgttccagccaccgg

SEQ ID NO: 14518 - RNA, 44 nt, synthetic construct
  source 1..44: mol_type = other RNA
aacctgaagctgctgttacctttgccaagtgttccagccaccgg

SEQ ID NO: 14519 - RNA, 45 nt, synthetic construct
  source 1..45: mol_type = other RNA
gaacctgaagctgctgttacctttgccaagtgttccagccaccgg

SEQ ID NO: 14520 - RNA, 46 nt, synthetic construct
  source 1..46: mol_type = other RNA
tgaacctgaagctgctgttacctttgccaagtgttccagccaccgg

SEQ ID NO: 14521 - RNA, 47 nt, synthetic construct
  source 1..47: mol_type = other RNA
ctgaacctgaagctgctgttacctttgccaagtgttccagccaccgg

SEQ ID NO: 14522 - RNA, 48 nt, synthetic construct
  source 1..48: mol_type = other RNA
tctgaacctgaagctgctgttacctttgccaagtgttccagccaccgg

SEQ ID NO: 14523 - RNA, 49 nt, synthetic construct
  source 1..49: mol_type = other RNA
ttctgaacctgaagctgctgttacctttgccaagtgttccagccaccgg

SEQ ID NO: 14524 - RNA, 50 nt, synthetic construct
  source 1..50: mol_type = other RNA
tttctgaacctgaagctgctgttacctttgccaagtgttccagccaccgg

SEQ ID NO: 14525 - RNA, 51 nt, synthetic construct
  source 1..51: mol_type = other RNA
ttttctgaacctgaagctgctgttacctttgccaagtgttccagccaccgg

SEQ ID NO: 14526 - RNA, 52 nt, synthetic construct
  source 1..52: mol_type = other RNA
cttttctgaacctgaagctgctgttacctttgccaagtgttccagccaccgg

SEQ ID NO: 14527 - RNA, 53 nt, synthetic construct
  source 1..53: mol_type = other RNA
tcttttctgaacctgaagctgctgttacctttgccaagtgttccagccaccgg

SEQ ID NO: 14528 - RNA, 54 nt, synthetic construct
  source 1..54: mol_type = other RNA
ctcttttctgaacctgaagctgctgttacctttgccaagtgttccagccaccgg

SEQ ID NO: 14529 - RNA, 55 nt, synthetic construct
  source 1..55: mol_type = other RNA
gctcttttctgaacctgaagctgctgttacctttgccaagtgttccagccaccgg

SEQ ID NO: 14530 - RNA, 56 nt, synthetic construct
  source 1..56: mol_type = other RNA
agctcttttctgaacctgaagctgctgttacctttgccaagtgttccagccaccgg

SEQ ID NO: 14531 - RNA, 57 nt, synthetic construct
  source 1..57: mol_type = other RNA
cagctcttttctgaacctgaagctgctgttacctttgccaagtgttccagccaccgg

SEQ ID NO: 14532 - RNA, 58 nt, synthetic construct
  source 1..58: mol_type = other RNA
gcagctcttttctgaacctgaagctgctgttacctttgccaagtgttccagccaccgg

SEQ ID NO: 14533 - RNA, 59 nt, synthetic construct
  source 1..59: mol_type = other RNA
agcagctcttttctgaacctgaagctgctgttacctttgccaagtgttccagccaccgg

SEQ ID NO: 14534 - RNA, 60 nt, synthetic construct
  source 1..60: mol_type = other RNA
gagcagctcttttctgaacctgaagctgctgttacctttgccaagtgttccagccaccgg

SEQ ID NO: 14535 - RNA, 61 nt, synthetic construct
  source 1..61: mol_type = other RNA
ggagcagctcttttctgaacctgaagctgctgttacctttgccaagtgttccagccaccgg

SEQ ID NO: 14536 - RNA, 62 nt, synthetic construct
  source 1..62: mol_type = other RNA
aggagcagctcttttctgaacctgaagctgctgttacctttgccaagtgttccagccaccgg

SEQ ID NO: 14537 - RNA, 63 nt, synthetic construct
  source 1..63: mol_type = other RNA
aaggagcagctcttttctgaacctgaagctgctgttacctttgccaagtgttccagccaccgg

SEQ ID NO: 14538 - RNA, 64 nt, synthetic construct
  source 1..64: mol_type = other RNA
gaaggagcagctcttttctgaacctgaagctgctgttacctttgccaagtgttccagccaccgg

SEQ ID NO: 14539 - RNA, 65 nt, synthetic construct
  source 1..65: mol_type = other RNA
tgaaggagcagctcttttctgaacctgaagctgctgttacctttgccaagtgttccagccaccgg

SEQ ID NO: 14540 - RNA, 66 nt, synthetic construct
  source 1..66: mol_type = other RNA
ctgaaggagcagctcttttctgaacctgaagctgctgttacctttgccaagtgttccagccaccgg

SEQ ID NO: 14541 - RNA, 67 nt, synthetic construct
  source 1..67: mol_type = other RNA
actgaaggagcagctcttttctgaacctgaagctgctgttacctttgccaagtgttccagccaccgg

SEQ ID NO: 14542 - RNA, 68 nt, synthetic construct
  source 1..68: mol_type = other RNA
tactgaaggagcagctcttttctgaacctgaagctgctgttacctttgccaagtgttccagccaccgg

SEQ ID NO: 14543 - RNA, 69 nt, synthetic construct
  source 1..69: mol_type = other RNA
ttactgaaggagcagctcttttctgaacctgaagctgctgttacctttgccaagtgttccagccaccgg

SEQ ID NO: 14544 - RNA, 70 nt, synthetic construct
  source 1..70: mol_type = other RNA
tttactgaaggagcagctcttttctgaacctgaagctgctgttacctttgccaagtgttccagccaccgg

SEQ ID NO: 14545 - RNA, 71 nt, synthetic construct
  source 1..71: mol_type = other RNA
gtttactgaaggagcagctcttttctgaacctgaagctgctgttacctttgccaagtgttccagccaccgg

SEQ ID NO: 14546 - RNA, 72 nt, synthetic construct
  source 1..72: mol_type = other RNA
tgtttactgaaggagcagctcttttctgaacctgaagctgctgttacctttgccaagtgttccagccaccgg

SEQ ID NO: 14547 - RNA, 73 nt, synthetic construct
  source 1..73: mol_type = other RNA
ttgtttactgaaggagcagctcttttctgaacctgaagctgctgttacctttgccaagtgttccagccaccgg

SEQ ID NO: 14548 - RNA, 74 nt, synthetic construct
  source 1..74: mol_type = other RNA
tttgtttactgaaggagcagctcttttctgaacctgaagctgctgttacctttgccaagtgttccagccaccgg

SEQ ID NO: 14549 - RNA, 75 nt, synthetic construct
  source 1..75: mol_type = other RNA
atttgtttactgaaggagcagctcttttctgaacctgaagctgctgttacctttgccaagtgttccagccaccgg

SEQ ID NO: 14550 - RNA, 76 nt, synthetic construct
  source 1..76: mol_type = other RNA
gatttgtttactgaaggagcagctcttttctgaacctgaagctgctgttacctttgccaagtgttccagccaccgg

SEQ ID NO: 14551 - RNA, 77 nt, synthetic construct
  source 1..77: mol_type = other RNA
agatttgtttactgaaggagcagctcttttctgaacctgaagctgctgttacctttgccaagtgttccagccaccgg

SEQ ID NO: 14552 - RNA, 78 nt, synthetic construct
  source 1..78: mol_type = other RNA
gagatttgtttactgaaggagcagctcttttctgaacctgaagctgctgttacctttgccaagtgttccagccaccgg

SEQ ID NO: 14553 - RNA, 79 nt, synthetic construct
  source 1..79: mol_type = other RNA
tgagatttgtttactgaaggagcagctcttttctgaacctgaagctgctgttacctttgccaagtgttccagccaccgg

SEQ ID NO: 14554 - RNA, 80 nt, synthetic construct
  source 1..80: mol_type = other RNA
gtgagatttgtttactgaaggagcagctcttttctgaacctgaagctgctgttacctttgccaagtgttccagccaccgg

SEQ ID NO: 14555 - RNA, 81 nt, synthetic construct
  source 1..81: mol_type = other RNA
agtgagatttgtttactgaaggagcagctcttttctgaacctgaagctgctgttacctttgccaagtgttccagccaccgg

SEQ ID NO: 14556 - RNA, 82 nt, synthetic construct
  source 1..82: mol_type = other RNA
aagtgagatttgtttactgaaggagcagctcttttctgaacctgaagctgctgttacctttgccaagtgttccagccaccgg

SEQ ID NO: 14557 - RNA, 83 nt, synthetic construct
  source 1..83: mol_type = other RNA
gaagtgagatttgtttactgaaggagcagctcttttctgaacctgaagctgctgttacctttgccaagtgttccagccaccgg

SEQ ID NO: 14558 - RNA, 84 nt, synthetic construct
  source 1..84: mol_type = other RNA
ggaagtgagatttgtttactgaaggagcagctcttttctgaacctgaagctgctgttacctttgccaagtgttccagccaccgg

SEQ ID NO: 14559 - RNA, 85 nt, synthetic construct
  source 1..85: mol_type = other RNA
aggaagtgagatttgtttactgaaggagcagctcttttctgaacctgaagctgctgttacctttgccaagtgttccagccaccgg

SEQ ID NO: 14560 - RNA, 86 nt, synthetic construct
  source 1..86: mol_type = other RNA
gaggaagtgagatttgtttactgaaggagcagctcttttctgaacctgaagctgctgttacctttgccaagtgttccagccaccgg

SEQ ID NO: 14561 - RNA, 87 nt, synthetic construct
  source 1..87: mol_type = other RNA
agaggaagtgagatttgtttactgaaggagcagctcttttctgaacctgaagctgctgttacctttgccaagtgttccagccaccgg

SEQ ID NO: 14562 - RNA, 88 nt, synthetic construct
  source 1..88: mol_type = other RNA
cagaggaagtgagatttgtttactgaaggagcagctcttttctgaacctgaagctgctgttacctttgccaagtgttccagccaccgg

SEQ ID NO: 14563 - RNA, 89 nt, synthetic construct
  source 1..89: mol_type = other RNA
tcagaggaagtgagatttgtttactgaaggagcagctcttttctgaacctgaagctgctgttacctttgccaagtgttccagccaccgg

SEQ ID NO: 14564 - RNA, 90 nt, synthetic construct
  source 1..90: mol_type = other RNA
ttcagaggaagtgagatttgtttactgaaggagcagctcttttctgaacctgaagctgctgttacctttgccaagtgttccagccaccgg

SEQ ID NO: 14565 - RNA, 91 nt, synthetic construct
  source 1..91: mol_type = other RNA
gttcagaggaagtgagatttgtttactgaaggagcagctcttttctgaacctgaagctgctgttacctttgccaagtgttccagccaccgg

SEQ ID NO: 14566 - RNA, 92 nt, synthetic construct
  source 1..92: mol_type = other RNA
tgttcagaggaagtgagatttgtttactgaaggagcagctcttttctgaacctgaagctgctgttacctttgccaagtgttccagccaccgg

SEQ ID NO: 14567 - RNA, 93 nt, synthetic construct
  source 1..93: mol_type = other RNA
gtgttcagaggaagtgagatttgtttactgaaggagcagctcttttctgaacctgaagctgctgttacctttgccaagtgttccagccaccgg

SEQ ID NO: 14568 - RNA, 94 nt, synthetic construct
  source 1..94: mol_type = other RNA
ggtgttcagaggaagtgagatttgtttactgaaggagcagctcttttctgaacctgaagctgctgttacctttgccaagtgttccagccaccgg

SEQ ID NO: 14569 - RNA, 95 nt, synthetic construct
  source 1..95: mol_type = other RNA
tggtgttcagaggaagtgagatttgtttactgaaggagcagctcttttctgaacctgaagctgctgttacctttgccaagtgttccagccaccgg

SEQ ID NO: 14570 - RNA, 96 nt, synthetic construct
  source 1..96: mol_type = other RNA
atggtgttcagaggaagtgagatttgtttactgaaggagcagctcttttctgaacctgaagctgctgttacctttgccaagtgttccagccaccgg

SEQ ID NO: 14571 - RNA, 97 nt, synthetic construct
  source 1..97: mol_type = other RNA
catggtgttcagaggaagtgagatttgtttactgaaggagcagctcttttctgaacctgaagctgctgttacctttgccaagtgttccagccaccgg

SEQ ID NO: 14572 - RNA, 98 nt, synthetic construct
  source 1..98: mol_type = other RNA
acatggtgttcagaggaagtgagatttgtttactgaaggagcagctcttttctgaacctgaagctgctgttacctttgccaagtgttccagccaccgg

SEQ ID NO: 14573 - RNA, 99 nt, synthetic construct
  source 1..99: mol_type = other RNA
aacatggtgttcagaggaagtgagatttgtttactgaaggagcagctcttttctgaacctgaagctgctgttacctttgccaagtgttccagccaccgg

SEQ ID NO: 14574 - RNA, 100 nt, synthetic construct
  source 1..100: mol_type = other RNA
aaacatggtgttcagaggaagtgagatttgtttactgaaggagcagctcttttctgaacctgaagctgctgttacctttgccaagtgttccagccaccgg

SEQ ID NO: 14575 - RNA, 20 nt, synthetic construct
  source 1..20: mol_type = other RNA
tataattagtaattctaaac

SEQ ID NO: 14576 - RNA, 16 nt, synthetic construct
  source 1..16: mol_type = other RNA
attagtaattctaaac

SEQ ID NO: 14577 - RNA, 17 nt, synthetic construct
  source 1..17: mol_type = other RNA
aattagtaattctaaac

SEQ ID NO: 14578 - RNA, 18 nt, synthetic construct
  source 1..18: mol_type = other RNA
taattagtaattctaaac

SEQ ID NO: 14579 - RNA, 19 nt, synthetic construct
  source 1..19: mol_type = other RNA
ataattagtaattctaaac

SEQ ID NO: 14580 - RNA, 20 nt, synthetic construct
  source 1..20: mol_type = other RNA
tataattagtaattctaaac

SEQ ID NO: 14581 - RNA, 21 nt, synthetic construct
  source 1..21: mol_type = other RNA
gtataattagtaattctaaac

SEQ ID NO: 14582 - RNA, 22 nt, synthetic construct
  source 1..22: mol_type = other RNA
tgtataattagtaattctaaac

SEQ ID NO: 14583-14589 - skipped (7 entries)

SEQ ID NO: 14590 - RNA, 10 nt, synthetic construct
  source 1..10: mol_type = other RNA
tagaattact

SEQ ID NO: 14591 - RNA, 11 nt, synthetic construct
  source 1..11: mol_type = other RNA
tagaattacta

SEQ ID NO: 14592 - RNA, 12 nt, synthetic construct
  source 1..12: mol_type = other RNA
tagaattactaa

SEQ ID NO: 14593 - RNA, 13 nt, synthetic construct
  source 1..13: mol_type = other RNA
tagaattactaat

SEQ ID NO: 14594 - RNA, 14 nt, synthetic construct
  source 1..14: mol_type = other RNA
tagaattactaatt

SEQ ID NO: 14595 - RNA, 15 nt, synthetic construct
  source 1..15: mol_type = other RNA
tagaattactaatta

SEQ ID NO: 14596 - RNA, 16 nt, synthetic construct
  source 1..16: mol_type = other RNA
tagaattactaattat

SEQ ID NO: 14597 - RNA, 17 nt, synthetic construct
  source 1..17: mol_type = other RNA
tagaattactaattata

SEQ ID NO: 14598 - RNA, 18 nt, synthetic construct
  source 1..18: mol_type = other RNA
tagaattactaattatac

SEQ ID NO: 14599 - RNA, 19 nt, synthetic construct
  source 1..19: mol_type = other RNA
tagaattactaattataca

SEQ ID NO: 14600 - RNA, 97 nt, synthetic construct
  source 1..97: mol_type = other RNA
ggtggctggaacacttggcaaaggtaacagcagcttcaggttcagaaaagagctgctccttcagtaaacaaatctcacttcctctgaacaccatgtt

SEQ ID NO: 14601 - RNA, 98 nt, synthetic construct
  source 1..98: mol_type = other RNA
cggtggctggaacacttggcaaaggtaacagcagcttcaggttcagaaaagagctgctccttcagtaaacaaatctcacttcctctgaacaccatgtt

SEQ ID NO: 14602 - RNA, 99 nt, synthetic construct
  source 1..99: mol_type = other RNA
ccggtggctggaacacttggcaaaggtaacagcagcttcaggttcagaaaagagctgctccttcagtaaacaaatctcacttcctctgaacaccatgtt

SEQ ID NO: 14603 - RNA, 100 nt, synthetic construct
  source 1..100: mol_type = other RNA
gccggtggctggaacacttggcaaaggtaacagcagcttcaggttcagaaaagagctgctccttcagtaaacaaatctcacttcctctgaacaccatgtt

SEQ ID NO: 14604 - RNA, 16 nt, synthetic construct
  source 1..16: mol_type = other RNA
tttattctctggtcat

SEQ ID NO: 14605 - RNA, 17 nt, synthetic construct
  source 1..17: mol_type = other RNA
gtttattctctggtcat

SEQ ID NO: 14606 - RNA, 18 nt, synthetic construct
  source 1..18: mol_type = other RNA
tgtttattctctggtcat

SEQ ID NO: 14607 - RNA, 19 nt, synthetic construct
  source 1..19: mol_type = other RNA
atgtttattctctggtcat

SEQ ID NO: 14608 - RNA, 20 nt, synthetic construct
  source 1..20: mol_type = other RNA
tatgtttattctctggtcat

SEQ ID NO: 14609 - RNA, 21 nt, synthetic construct
  source 1..21: mol_type = other RNA
ttatgtttattctctggtcat

SEQ ID NO: 14610 - RNA, 22 nt, synthetic construct
  source 1..22: mol_type = other RNA
cttatgtttattctctggtcat

SEQ ID NO: 14611-14614 - skipped (4 entries)

SEQ ID NO: 14615 - RNA, 10 nt, synthetic construct
  source 1..10: mol_type = other RNA
accagagaat

SEQ ID NO: 14616 - RNA, 11 nt, synthetic construct
  source 1..11: mol_type = other RNA
accagagaata

SEQ ID NO: 14617 - RNA, 12 nt, synthetic construct
  source 1..12: mol_type = other RNA
accagagaataa

SEQ ID NO: 14618 - RNA, 13 nt, synthetic construct
  source 1..13: mol_type = other RNA
accagagaataaa

SEQ ID NO: 14619 - RNA, 14 nt, synthetic construct
  source 1..14: mol_type = other RNA
accagagaataaac

SEQ ID NO: 14620 - RNA, 15 nt, synthetic construct
  source 1..15: mol_type = other RNA
accagagaataaaca

SEQ ID NO: 14621 - RNA, 16 nt, synthetic construct
  source 1..16: mol_type = other RNA
accagagaataaacat

SEQ ID NO: 14622 - RNA, 17 nt, synthetic construct
  source 1..17: mol_type = other RNA
accagagaataaacata

SEQ ID NO: 14623 - RNA, 18 nt, synthetic construct
  source 1..18: mol_type = other RNA
accagagaataaacataa

SEQ ID NO: 14624 - RNA, 19 nt, synthetic construct
  source 1..19: mol_type = other RNA
accagagaataaacataag

SEQ ID NO: 14625 - RNA, 96 nt, synthetic construct
  source 1..96: mol_type = other RNA
cggcccagggcaatgaacacaaagagcatggggggcgtgtcgaagaatgtcacagggctcctctccgccttctcagccacagcaaccacaaggatg

SEQ ID NO: 14626 - RNA, 96 nt, synthetic construct
  source 1..96: mol_type = other RNA
cggcccagggcaatgaacacaaagagcatggggggcgtgtcgaagaatgtcacagggctcctctccgccttctcagccacagcaaccaccaggatg

SEQ ID NO: 14627 - RNA, 96 nt, synthetic construct
  source 1..96: mol_type = other RNA
cggcccagggcaatgaacacaaagagcatggggggcgtgtcgaagaatgtcacagggctcctctccgccttctcagccacagcaaccacgaggatg

SEQ ID NO: 14628 - RNA, 97 nt, synthetic construct
  source 1..97: mol_type = other RNA
ccggcccagggcaatgaacacaaagagcatggggggcgtgtcgaagaatgtcacagggctcctctccgccttctcagccacagcaaccacgaggatg

SEQ ID NO: 14629 - RNA, 97 nt, synthetic construct
  source 1..97: mol_type = other RNA
ccggcccagggcaatgaacacaaagagcatggggggcgtgtcgaagaatgtcacagggctcctctccgccttctcagccacagcaaccacaaggatg

SEQ ID NO: 14630 - RNA, 97 nt, synthetic construct
  source 1..97: mol_type = other RNA
ccggcccagggcaatgaacacaaagagcatggggggcgtgtcgaagaatgtcacagggctcctctccgccttctcagccacagcaaccaccaggatg

SEQ ID NO: 14631 - RNA, 98 nt, synthetic construct
  source 1..98: mol_type = other RNA
accggcccagggcaatgaacacaaagagcatggggggcgtgtcgaagaatgtcacagggctcctctccgccttctcagccacagcaaccaccaggatg

SEQ ID NO: 14632 - RNA, 98 nt, synthetic construct
  source 1..98: mol_type = other RNA
accggcccagggcaatgaacacaaagagcatggggggcgtgtcgaagaatgtcacagggctcctctccgccttctcagccacagcaaccacgaggatg

SEQ ID NO: 14633 - RNA, 98 nt, synthetic construct
  source 1..98: mol_type = other RNA
accggcccagggcaatgaacacaaagagcatggggggcgtgtcgaagaatgtcacagggctcctctccgccttctcagccacagcaaccacaaggatg

SEQ ID NO: 14634 - RNA, 99 nt, synthetic construct
  source 1..99: mol_type = other RNA
caccggcccagggcaatgaacacaaagagcatggggggcgtgtcgaagaatgtcacagggctcctctccgccttctcagccacagcaaccacaaggatg

SEQ ID NO: 14635 - RNA, 99 nt, synthetic construct
  source 1..99: mol_type = other RNA
caccggcccagggcaatgaacacaaagagcatggggggcgtgtcgaagaatgtcacagggctcctctccgccttctcagccacagcaaccacgaggatg

SEQ ID NO: 14636 - RNA, 99 nt, synthetic construct
  source 1..99: mol_type = other RNA
caccggcccagggcaatgaacacaaagagcatggggggcgtgtcgaagaatgtcacagggctcctctccgccttctcagccacagcaaccaccaggatg

SEQ ID NO: 14637 - RNA, 100 nt, synthetic construct
  source 1..100: mol_type = other RNA
ccaccggcccagggcaatgaacacaaagagcatggggggcgtgtcgaagaatgtcacagggctcctctccgccttctcagccacagcaaccaccaggatg

SEQ ID NO: 14638 - RNA, 100 nt, synthetic construct
  source 1..100: mol_type = other RNA
ccaccggcccagggcaatgaacacaaagagcatggggggcgtgtcgaagaatgtcacagggctcctctccgccttctcagccacagcaaccacgaggatg

SEQ ID NO: 14639 - RNA, 100 nt, synthetic construct
  source 1..100: mol_type = other RNA
ccaccggcccagggcaatgaacacaaagagcatggggggcgtgtcgaagaatgtcacagggctcctctccgccttctcagccacagcaaccacaaggatg

SEQ ID NO: 14640 - RNA, 16 nt, synthetic construct
  source 1..16: mol_type = other RNA
aattagtaattctaaa

SEQ ID NO: 14641 - RNA, 17 nt, synthetic construct
  source 1..17: mol_type = other RNA
taattagtaattctaaa

SEQ ID NO: 14642 - RNA, 18 nt, synthetic construct
  source 1..18: mol_type = other RNA
ataattagtaattctaaa

SEQ ID NO: 14643 - RNA, 19 nt, synthetic construct
  source 1..19: mol_type = other RNA
tataattagtaattctaaa

SEQ ID NO: 14644 - RNA, 20 nt, synthetic construct
  source 1..20: mol_type = other RNA
gtataattagtaattctaaa

SEQ ID NO: 14645 - RNA, 21 nt, synthetic construct
  source 1..21: mol_type = other RNA
tgtataattagtaattctaaa

SEQ ID NO: 14646 - RNA, 22 nt, synthetic construct
  source 1..22: mol_type = other RNA
gtgtataattagtaattctaaa

SEQ ID NO: 14647-14652 - skipped (6 entries)

SEQ ID NO: 14653 - RNA, 10 nt, synthetic construct
  source 1..10: mol_type = other RNA
agaattacta

SEQ ID NO: 14654 - RNA, 11 nt, synthetic construct
  source 1..11: mol_type = other RNA
agaattactaa

SEQ ID NO: 14655 - RNA, 12 nt, synthetic construct
  source 1..12: mol_type = other RNA
agaattactaat

SEQ ID NO: 14656 - RNA, 13 nt, synthetic construct
  source 1..13: mol_type = other RNA
agaattactaatt

SEQ ID NO: 14657 - RNA, 14 nt, synthetic construct
  source 1..14: mol_type = other RNA
agaattactaatta

SEQ ID NO: 14658 - RNA, 15 nt, synthetic construct
  source 1..15: mol_type = other RNA
agaattactaattat

SEQ ID NO: 14659 - RNA, 16 nt, synthetic construct
  source 1..16: mol_type = other RNA
agaattactaattata

SEQ ID NO: 14660 - RNA, 17 nt, synthetic construct
  source 1..17: mol_type = other RNA
agaattactaattatac

SEQ ID NO: 14661 - RNA, 18 nt, synthetic construct
  source 1..18: mol_type = other RNA
agaattactaattataca

SEQ ID NO: 14662 - RNA, 19 nt, synthetic construct
  source 1..19: mol_type = other RNA
agaattactaattatacac

SEQ ID NO: 14663 - RNA, 98 nt, synthetic construct
  source 1..98: mol_type = other RNA
ggtggctggaacacttggcaaaggtaacagcagcttcaggttcagaaaagagctgctccttcagtaaacaaatctcacttcctctgaacaccatgttt

SEQ ID NO: 14664 - RNA, 99 nt, synthetic construct
  source 1..99: mol_type = other RNA
cggtggctggaacacttggcaaaggtaacagcagcttcaggttcagaaaagagctgctccttcagtaaacaaatctcacttcctctgaacaccatgttt

SEQ ID NO: 14665 - RNA, 100 nt, synthetic construct
  source 1..100: mol_type = other RNA
ccggtggctggaacacttggcaaaggtaacagcagcttcaggttcagaaaagagctgctccttcagtaaacaaatctcacttcctctgaacaccatgttt

SEQ ID NO: 14666 - RNA, 16 nt, synthetic construct
  source 1..16: mol_type = other RNA
gctgctgttacctttg

SEQ ID NO: 14667 - RNA, 17 nt, synthetic construct
  source 1..17: mol_type = other RNA
agctgctgttacctttg

SEQ ID NO: 14668 - RNA, 18 nt, synthetic construct
  source 1..18: mol_type = other RNA
aagctgctgttacctttg

SEQ ID NO: 14669 - RNA, 19 nt, synthetic construct
  source 1..19: mol_type = other RNA
gaagctgctgttacctttg

SEQ ID NO: 14670 - RNA, 20 nt, synthetic construct
  source 1..20: mol_type = other RNA
tgaagctgctgttacctttg

SEQ ID NO: 14671 - RNA, 21 nt, synthetic construct
  source 1..21: mol_type = other RNA
ctgaagctgctgttacctttg

SEQ ID NO: 14672 - RNA, 22 nt, synthetic construct
  source 1..22: mol_type = other RNA
cctgaagctgctgttacctttg

SEQ ID NO: 14673-14678 - skipped (6 entries)

SEQ ID NO: 14679 - RNA, 10 nt, synthetic construct
  source 1..10: mol_type = other RNA
aggtaacagc

SEQ ID NO: 14680 - RNA, 11 nt, synthetic construct
  source 1..11: mol_type = other RNA
aggtaacagca

SEQ ID NO: 14681 - RNA, 12 nt, synthetic construct
  source 1..12: mol_type = other RNA
aggtaacagcag

SEQ ID NO: 14682 - RNA, 13 nt, synthetic construct
  source 1..13: mol_type = other RNA
aggtaacagcagc

SEQ ID NO: 14683 - RNA, 14 nt, synthetic construct
  source 1..14: mol_type = other RNA
aggtaacagcagct

SEQ ID NO: 14684 - RNA, 15 nt, synthetic construct
  source 1..15: mol_type = other RNA
aggtaacagcagctt

SEQ ID NO: 14685 - RNA, 16 nt, synthetic construct
  source 1..16: mol_type = other RNA
aggtaacagcagcttc

SEQ ID NO: 14686 - RNA, 17 nt, synthetic construct
  source 1..17: mol_type = other RNA
aggtaacagcagcttca

SEQ ID NO: 14687 - RNA, 18 nt, synthetic construct
  source 1..18: mol_type = other RNA
aggtaacagcagcttcag

SEQ ID NO: 14688 - RNA, 19 nt, synthetic construct
  source 1..19: mol_type = other RNA
aggtaacagcagcttcagg

SEQ ID NO: 14689 - RNA, 21 nt, synthetic construct
  source 1..21: mol_type = other RNA
ggtggctggaacacttggcaa

SEQ ID NO: 14690 - RNA, 22 nt, synthetic construct
  source 1..22: mol_type = other RNA
cggtggctggaacacttggcaa

SEQ ID NO: 14691 - RNA, 23 nt, synthetic construct
  source 1..23: mol_type = other RNA
ccggtggctggaacacttggcaa

SEQ ID NO: 14692 - RNA, 24 nt, synthetic construct
  source 1..24: mol_type = other RNA
gccggtggctggaacacttggcaa

SEQ ID NO: 14693 - RNA, 25 nt, synthetic construct
  source 1..25: mol_type = other RNA
ggccggtggctggaacacttggcaa

SEQ ID NO: 14694 - RNA, 26 nt, synthetic construct
  source 1..26: mol_type = other RNA
gggccggtggctggaacacttggcaa

SEQ ID NO: 14695 - RNA, 27 nt, synthetic construct
  source 1..27: mol_type = other RNA
tgggccggtggctggaacacttggcaa

SEQ ID NO: 14696 - RNA, 28 nt, synthetic construct
  source 1..28: mol_type = other RNA
ctgggccggtggctggaacacttggcaa

SEQ ID NO: 14697 - RNA, 29 nt, synthetic construct
  source 1..29: mol_type = other RNA
cctgggccggtggctggaacacttggcaa

SEQ ID NO: 14698 - RNA, 30 nt, synthetic construct
  source 1..30: mol_type = other RNA
ccctgggccggtggctggaacacttggcaa

SEQ ID NO: 14699 - RNA, 31 nt, synthetic construct
  source 1..31: mol_type = other RNA
gccctgggccggtggctggaacacttggcaa

SEQ ID NO: 14700 - RNA, 32 nt, synthetic construct
  source 1..32: mol_type = other RNA
tgccctgggccggtggctggaacacttggcaa

SEQ ID NO: 14701 - RNA, 33 nt, synthetic construct
  source 1..33: mol_type = other RNA
ttgccctgggccggtggctggaacacttggcaa

SEQ ID NO: 14702 - RNA, 34 nt, synthetic construct
  source 1..34: mol_type = other RNA
attgccctgggccggtggctggaacacttggcaa

SEQ ID NO: 14703 - RNA, 35 nt, synthetic construct
  source 1..35: mol_type = other RNA
cattgccctgggccggtggctggaacacttggcaa

SEQ ID NO: 14704 - RNA, 36 nt, synthetic construct
  source 1..36: mol_type = other RNA
tcattgccctgggccggtggctggaacacttggcaa

SEQ ID NO: 14705 - RNA, 37 nt, synthetic construct
  source 1..37: mol_type = other RNA
ttcattgccctgggccggtggctggaacacttggcaa

SEQ ID NO: 14706 - RNA, 38 nt, synthetic construct
  source 1..38: mol_type = other RNA
gttcattgccctgggccggtggctggaacacttggcaa

SEQ ID NO: 14707 - RNA, 39 nt, synthetic construct
  source 1..39: mol_type = other RNA
tgttcattgccctgggccggtggctggaacacttggcaa

SEQ ID NO: 14708 - RNA, 40 nt, synthetic construct
  source 1..40: mol_type = other RNA
gtgttcattgccctgggccggtggctggaacacttggcaa

SEQ ID NO: 14709 - RNA, 41 nt, synthetic construct
  source 1..41: mol_type = other RNA
tgtgttcattgccctgggccggtggctggaacacttggcaa

SEQ ID NO: 14710 - RNA, 42 nt, synthetic construct
  source 1..42: mol_type = other RNA
ttgtgttcattgccctgggccggtggctggaacacttggcaa

SEQ ID NO: 14711 - RNA, 43 nt, synthetic construct
  source 1..43: mol_type = other RNA
tttgtgttcattgccctgggccggtggctggaacacttggcaa

SEQ ID NO: 14712 - RNA, 44 nt, synthetic construct
  source 1..44: mol_type = other RNA
ctttgtgttcattgccctgggccggtggctggaacacttggcaa

SEQ ID NO: 14713 - RNA, 45 nt, synthetic construct
  source 1..45: mol_type = other RNA
tctttgtgttcattgccctgggccggtggctggaacacttggcaa

SEQ ID NO: 14714 - RNA, 46 nt, synthetic construct
  source 1..46: mol_type = other RNA
ctctttgtgttcattgccctgggccggtggctggaacacttggcaa

SEQ ID NO: 14715 - RNA, 47 nt, synthetic construct
  source 1..47: mol_type = other RNA
gctctttgtgttcattgccctgggccggtggctggaacacttggcaa

SEQ ID NO: 14716 - RNA, 48 nt, synthetic construct
  source 1..48: mol_type = other RNA
tgctctttgtgttcattgccctgggccggtggctggaacacttggcaa

SEQ ID NO: 14717 - RNA, 49 nt, synthetic construct
  source 1..49: mol_type = other RNA
atgctctttgtgttcattgccctgggccggtggctggaacacttggcaa

SEQ ID NO: 14718 - RNA, 50 nt, synthetic construct
  source 1..50: mol_type = other RNA
catgctctttgtgttcattgccctgggccggtggctggaacacttggcaa

SEQ ID NO: 14719 - RNA, 51 nt, synthetic construct
  source 1..51: mol_type = other RNA
ccatgctctttgtgttcattgccctgggccggtggctggaacacttggcaa

SEQ ID NO: 14720 - RNA, 52 nt, synthetic construct
  source 1..52: mol_type = other RNA
cccatgctctttgtgttcattgccctgggccggtggctggaacacttggcaa

SEQ ID NO: 14721 - RNA, 53 nt, synthetic construct
  source 1..53: mol_type = other RNA
ccccatgctctttgtgttcattgccctgggccggtggctggaacacttggcaa

SEQ ID NO: 14722 - RNA, 54 nt, synthetic construct
  source 1..54: mol_type = other RNA
cccccatgctctttgtgttcattgccctgggccggtggctggaacacttggcaa

SEQ ID NO: 14723 - RNA, 55 nt, synthetic construct
  source 1..55: mol_type = other RNA
ccccccatgctctttgtgttcattgccctgggccggtggctggaacacttggcaa

SEQ ID NO: 14724 - RNA, 56 nt, synthetic construct
  source 1..56: mol_type = other RNA
gccccccatgctctttgtgttcattgccctgggccggtggctggaacacttggcaa

SEQ ID NO: 14725 - RNA, 57 nt, synthetic construct
  source 1..57: mol_type = other RNA
cgccccccatgctctttgtgttcattgccctgggccggtggctggaacacttggcaa

SEQ ID NO: 14726 - RNA, 58 nt, synthetic construct
  source 1..58: mol_type = other RNA
acgccccccatgctctttgtgttcattgccctgggccggtggctggaacacttggcaa

SEQ ID NO: 14727 - RNA, 59 nt, synthetic construct
  source 1..59: mol_type = other RNA
cacgccccccatgctctttgtgttcattgccctgggccggtggctggaacacttggcaa

SEQ ID NO: 14728 - RNA, 60 nt, synthetic construct
  source 1..60: mol_type = other RNA
acacgccccccatgctctttgtgttcattgccctgggccggtggctggaacacttggcaa

SEQ ID NO: 14729 - RNA, 61 nt, synthetic construct
  source 1..61: mol_type = other RNA
gacacgccccccatgctctttgtgttcattgccctgggccggtggctggaacacttggcaa

SEQ ID NO: 14730 - RNA, 62 nt, synthetic construct
  source 1..62: mol_type = other RNA
cgacacgccccccatgctctttgtgttcattgccctgggccggtggctggaacacttggcaa

SEQ ID NO: 14731 - RNA, 63 nt, synthetic construct
  source 1..63: mol_type = other RNA
tcgacacgccccccatgctctttgtgttcattgccctgggccggtggctggaacacttggcaa

SEQ ID NO: 14732 - RNA, 64 nt, synthetic construct
  source 1..64: mol_type = other RNA
ttcgacacgccccccatgctctttgtgttcattgccctgggccggtggctggaacacttggcaa

SEQ ID NO: 14733 - RNA, 65 nt, synthetic construct
  source 1..65: mol_type = other RNA
cttcgacacgccccccatgctctttgtgttcattgccctgggccggtggctggaacacttggcaa

SEQ ID NO: 14734 - RNA, 66 nt, synthetic construct
  source 1..66: mol_type = other RNA
tcttcgacacgccccccatgctctttgtgttcattgccctgggccggtggctggaacacttggcaa

SEQ ID NO: 14735 - RNA, 67 nt, synthetic construct
  source 1..67: mol_type = other RNA
ttcttcgacacgccccccatgctctttgtgttcattgccctgggccggtggctggaacacttggcaa

SEQ ID NO: 14736 - RNA, 68 nt, synthetic construct
  source 1..68: mol_type = other RNA
attcttcgacacgccccccatgctctttgtgttcattgccctgggccggtggctggaacacttggcaa

SEQ ID NO: 14737 - RNA, 69 nt, synthetic construct
  source 1..69: mol_type = other RNA
cattcttcgacacgccccccatgctctttgtgttcattgccctgggccggtggctggaacacttggcaa

SEQ ID NO: 14738 - RNA, 70 nt, synthetic construct
  source 1..70: mol_type = other RNA
acattcttcgacacgccccccatgctctttgtgttcattgccctgggccggtggctggaacacttggcaa

SEQ ID NO: 14739 - RNA, 71 nt, synthetic construct
  source 1..71: mol_type = other RNA
gacattcttcgacacgccccccatgctctttgtgttcattgccctgggccggtggctggaacacttggcaa

SEQ ID NO: 14740 - RNA, 72 nt, synthetic construct
  source 1..72: mol_type = other RNA
tgacattcttcgacacgccccccatgctctttgtgttcattgccctgggccggtggctggaacacttggcaa

SEQ ID NO: 14741 - RNA, 73 nt, synthetic construct
  source 1..73: mol_type = other RNA
gtgacattcttcgacacgccccccatgctctttgtgttcattgccctgggccggtggctggaacacttggcaa

SEQ ID NO: 14742 - RNA, 74 nt, synthetic construct
  source 1..74: mol_type = other RNA
tgtgacattcttcgacacgccccccatgctctttgtgttcattgccctgggccggtggctggaacacttggcaa

SEQ ID NO: 14743 - RNA, 75 nt, synthetic construct
  source 1..75: mol_type = other RNA
ctgtgacattcttcgacacgccccccatgctctttgtgttcattgccctgggccggtggctggaacacttggcaa

SEQ ID NO: 14744 - RNA, 76 nt, synthetic construct
  source 1..76: mol_type = other RNA
cctgtgacattcttcgacacgccccccatgctctttgtgttcattgccctgggccggtggctggaacacttggcaa

SEQ ID NO: 14745 - RNA, 77 nt, synthetic construct
  source 1..77: mol_type = other RNA
ccctgtgacattcttcgacacgccccccatgctctttgtgttcattgccctgggccggtggctggaacacttggcaa

SEQ ID NO: 14746 - RNA, 78 nt, synthetic construct
  source 1..78: mol_type = other RNA
gccctgtgacattcttcgacacgccccccatgctctttgtgttcattgccctgggccggtggctggaacacttggcaa

SEQ ID NO: 14747 - RNA, 79 nt, synthetic construct
  source 1..79: mol_type = other RNA
agccctgtgacattcttcgacacgccccccatgctctttgtgttcattgccctgggccggtggctggaacacttggcaa

SEQ ID NO: 14748 - RNA, 80 nt, synthetic construct
  source 1..80: mol_type = other RNA
gagccctgtgacattcttcgacacgccccccatgctctttgtgttcattgccctgggccggtggctggaacacttggcaa

SEQ ID NO: 14749 - RNA, 81 nt, synthetic construct
  source 1..81: mol_type = other RNA
ggagccctgtgacattcttcgacacgccccccatgctctttgtgttcattgccctgggccggtggctggaacacttggcaa

SEQ ID NO: 14750 - RNA, 82 nt, synthetic construct
  source 1..82: mol_type = other RNA
aggagccctgtgacattcttcgacacgccccccatgctctttgtgttcattgccctgggccggtggctggaacacttggcaa

SEQ ID NO: 14751 - RNA, 83 nt, synthetic construct
  source 1..83: mol_type = other RNA
gaggagccctgtgacattcttcgacacgccccccatgctctttgtgttcattgccctgggccggtggctggaacacttggcaa

SEQ ID NO: 14752 - RNA, 84 nt, synthetic construct
  source 1..84: mol_type = other RNA
agaggagccctgtgacattcttcgacacgccccccatgctctttgtgttcattgccctgggccggtggctggaacacttggcaa

SEQ ID NO: 14753 - RNA, 85 nt, synthetic construct
  source 1..85: mol_type = other RNA
gagaggagccctgtgacattcttcgacacgccccccatgctctttgtgttcattgccctgggccggtggctggaacacttggcaa

SEQ ID NO: 14754 - RNA, 86 nt, synthetic construct
  source 1..86: mol_type = other RNA
ggagaggagccctgtgacattcttcgacacgccccccatgctctttgtgttcattgccctgggccggtggctggaacacttggcaa

SEQ ID NO: 14755 - RNA, 87 nt, synthetic construct
  source 1..87: mol_type = other RNA
cggagaggagccctgtgacattcttcgacacgccccccatgctctttgtgttcattgccctgggccggtggctggaacacttggcaa

SEQ ID NO: 14756 - RNA, 88 nt, synthetic construct
  source 1..88: mol_type = other RNA
gcggagaggagccctgtgacattcttcgacacgccccccatgctctttgtgttcattgccctgggccggtggctggaacacttggcaa

SEQ ID NO: 14757 - RNA, 89 nt, synthetic construct
  source 1..89: mol_type = other RNA
ggcggagaggagccctgtgacattcttcgacacgccccccatgctctttgtgttcattgccctgggccggtggctggaacacttggcaa

SEQ ID NO: 14758 - RNA, 90 nt, synthetic construct
  source 1..90: mol_type = other RNA
aggcggagaggagccctgtgacattcttcgacacgccccccatgctctttgtgttcattgccctgggccggtggctggaacacttggcaa

SEQ ID NO: 14759 - RNA, 91 nt, synthetic construct
  source 1..91: mol_type = other RNA
aaggcggagaggagccctgtgacattcttcgacacgccccccatgctctttgtgttcattgccctgggccggtggctggaacacttggcaa

SEQ ID NO: 14760 - RNA, 92 nt, synthetic construct
  source 1..92: mol_type = other RNA
gaaggcggagaggagccctgtgacattcttcgacacgccccccatgctctttgtgttcattgccctgggccggtggctggaacacttggcaa

SEQ ID NO: 14761 - RNA, 93 nt, synthetic construct
  source 1..93: mol_type = other RNA
agaaggcggagaggagccctgtgacattcttcgacacgccccccatgctctttgtgttcattgccctgggccggtggctggaacacttggcaa

SEQ ID NO: 14762 - RNA, 94 nt, synthetic construct
  source 1..94: mol_type = other RNA
gagaaggcggagaggagccctgtgacattcttcgacacgccccccatgctctttgtgttcattgccctgggccggtggctggaacacttggcaa

SEQ ID NO: 14763 - RNA, 95 nt, synthetic construct
  source 1..95: mol_type = other RNA
tgagaaggcggagaggagccctgtgacattcttcgacacgccccccatgctctttgtgttcattgccctgggccggtggctggaacacttggcaa

SEQ ID NO: 14764 - RNA, 96 nt, synthetic construct
  source 1..96: mol_type = other RNA
ctgagaaggcggagaggagccctgtgacattcttcgacacgccccccatgctctttgtgttcattgccctgggccggtggctggaacacttggcaa

SEQ ID NO: 14765 - RNA, 97 nt, synthetic construct
  source 1..97: mol_type = other RNA
gctgagaaggcggagaggagccctgtgacattcttcgacacgccccccatgctctttgtgttcattgccctgggccggtggctggaacacttggcaa

SEQ ID NO: 14766 - RNA, 98 nt, synthetic construct
  source 1..98: mol_type = other RNA
ggctgagaaggcggagaggagccctgtgacattcttcgacacgccccccatgctctttgtgttcattgccctgggccggtggctggaacacttggcaa

SEQ ID NO: 14767 - RNA, 99 nt, synthetic construct
  source 1..99: mol_type = other RNA
tggctgagaaggcggagaggagccctgtgacattcttcgacacgccccccatgctctttgtgttcattgccctgggccggtggctggaacacttggcaa

SEQ ID NO: 14768 - RNA, 100 nt, synthetic construct
  source 1..100: mol_type = other RNA
gtggctgagaaggcggagaggagccctgtgacattcttcgacacgccccccatgctctttgtgttcattgccctgggccggtggctggaacacttggcaa

SEQ ID NO: 14769 - RNA, 125 nt, synthetic construct
  source 1..125: mol_type = other RNA
ttgccaagtgttccagccacgttttagagctagaaatagcaagttaaaataaggctagtccgttatcaacttgaaaaagtggcaccgagtcggtgcattgccctgggaaggtggctggaactttt

SEQ ID NO: 14770 - RNA, 124 nt, synthetic construct
  source 1..124: mol_type = other RNA
ttgccaagtgttccagccacgttttagagctagaaatagcaagttaaaataaggctagtccgttatcaacttgaaaaagtggcaccgagtcggtgcgccctgggaaggtggctggaacactttt

SEQ ID NO: 14771 - RNA, 125 nt, synthetic construct
  source 1..125: mol_type = other RNA
ttgccaagtgttccagccacgttttagagctagaaatagcaagttaaaataaggctagtccgttatcaacttgaaaaagtggcaccgagtcggtgctgccctgggacggtggctggaacactttt

SEQ ID NO: 14772 - RNA, 125 nt, synthetic construct
  source 1..125: mol_type = other RNA
ttgccaagtgttccagccacgttttagagctagaaatagcaagttaaaataaggctagtccgttatcaacttgaaaaagtggcaccgagtcggtgctgccctgggaaggtggctggaacactttt

SEQ ID NO: 14773 - RNA, 126 nt, synthetic construct
  source 1..126: mol_type = other RNA
ttgccaagtgttccagccacgttttagagctagaaatagcaagttaaaataaggctagtccgttatcaacttgaaaaagtggcaccgagtcggtgcttgccctggggcggtggctggaacactttt

SEQ ID NO: 14774 - RNA, 126 nt, synthetic construct
  source 1..126: mol_type = other RNA
ttgccaagtgttccagccacgttttagagctagaaatagcaagttaaaataaggctagtccgttatcaacttgaaaaagtggcaccgagtcggtgcttgccctgggacggtggctggaacactttt

SEQ ID NO: 14775 - RNA, 126 nt, synthetic construct
  source 1..126: mol_type = other RNA
ttgccaagtgttccagccacgttttagagctagaaatagcaagttaaaataaggctagtccgttatcaacttgaaaaagtggcaccgagtcggtgcttgccctggggaggtggctggaacactttt

SEQ ID NO: 14776 - RNA, 126 nt, synthetic construct
  source 1..126: mol_type = other RNA
ttgccaagtgttccagccacgttttagagctagaaatagcaagttaaaataaggctagtccgttatcaacttgaaaaagtggcaccgagtcggtgcttgccctgggaaggtggctggaacactttt

SEQ ID NO: 14777 - RNA, 127 nt, synthetic construct
  source 1..127: mol_type = other RNA
ttgccaagtgttccagccacgttttagagctagaaatagcaagttaaaataaggctagtccgttatcaacttgaaaaagtggcaccgagtcggtgcattgccctgggtcggtggctggaacactttt

SEQ ID NO: 14778 - RNA, 127 nt, synthetic construct
  source 1..127: mol_type = other RNA
ttgccaagtgttccagccacgttttagagctagaaatagcaagttaaaataaggctagtccgttatcaacttgaaaaagtggcaccgagtcggtgcattgccctggggcggtggctggaacactttt

SEQ ID NO: 14779 - RNA, 127 nt, synthetic construct
  source 1..127: mol_type = other RNA
ttgccaagtgttccagccacgttttagagctagaaatagcaagttaaaataaggctagtccgttatcaacttgaaaaagtggcaccgagtcggtgcattgccctgggacggtggctggaacactttt

SEQ ID NO: 14780 - RNA, 127 nt, synthetic construct
  source 1..127: mol_type = other RNA
ttgccaagtgttccagccacgttttagagctagaaatagcaagttaaaataaggctagtccgttatcaacttgaaaaagtggcaccgagtcggtgcattgccctgggtaggtggctggaacactttt

SEQ ID NO: 14781 - RNA, 127 nt, synthetic construct
  source 1..127: mol_type = other RNA
ttgccaagtgttccagccacgttttagagctagaaatagcaagttaaaataaggctagtccgttatcaacttgaaaaagtggcaccgagtcggtgcattgccctggggaggtggctggaacactttt

SEQ ID NO: 14782 - RNA, 127 nt, synthetic construct
  source 1..127: mol_type = other RNA
ttgccaagtgttccagccacgttttagagctagaaatagcaagttaaaataaggctagtccgttatcaacttgaaaaagtggcaccgagtcggtgcattgccctgggcaggtggctggaacactttt

SEQ ID NO: 14783 - RNA, 127 nt, synthetic construct
  source 1..127: mol_type = other RNA
ttgccaagtgttccagccacgttttagagctagaaatagcaagttaaaataaggctagtccgttatcaacttgaaaaagtggcaccgagtcggtgcattgccctgggaaggtggctggaacactttt

SEQ ID NO: 14784 - RNA, 129 nt, synthetic construct
  source 1..129: mol_type = other RNA
ttgccaagtgttccagccacgttttagagctagaaatagcaagttaaaataaggctagtccgttatcaacttgaaaaagtggcaccgagtcggtgctcattgccctggggcggtggctggaacactttt

SEQ ID NO: 14785 - RNA, 129 nt, synthetic construct
  source 1..129: mol_type = other RNA
ttgccaagtgttccagccacgttttagagctagaaatagcaagttaaaataaggctagtccgttatcaacttgaaaaagtggcaccgagtcggtgctcattgccctgggacggtggctggaacactttt

SEQ ID NO: 14786 - RNA, 129 nt, synthetic construct
  source 1..129: mol_type = other RNA
ttgccaagtgttccagccacgttttagagctagaaatagcaagttaaaataaggctagtccgttatcaacttgaaaaagtggcaccgagtcggtgctcattgccctggggaggtggctggaacactttt

SEQ ID NO: 14787 - RNA, 130 nt, synthetic construct
  source 1..130: mol_type = other RNA
ttgccaagtgttccagccacgttttagagctagaaatagcaagttaaaataaggctagtccgttatcaacttgaaaaagtggcaccgagtcggtgcttcattgccctgggcaggtggctggaacactttt

SEQ ID NO: 14788 - RNA, 126 nt, synthetic construct
  source 1..126: mol_type = other RNA
ttgccaagtgttccagccacgttttagagctagaaatagcaagttaaaataaggctagtccgttatcaacttgaaaaagtggcaccgagtcggtgcgccctgggaaggtggctggaacactttttt

SEQ ID NO: 14789 - RNA, 128 nt, synthetic construct
  source 1..128: mol_type = other RNA
ttgccaagtgttccagccacgttttagagctagaaatagcaagttaaaataaggctagtccgttatcaacttgaaaaagtggcaccgagtcggtgcttgccctgggaaggtggctggaacactttttt

SEQ ID NO: 14790 - RNA, 129 nt, synthetic construct
  source 1..129: mol_type = other RNA
ttgccaagtgttccagccacgttttagagctagaaatagcaagttaaaataaggctagtccgttatcaacttgaaaaagtggcaccgagtcggtgcattgccctggggcggtggctggaacactttttt

SEQ ID NO: 14791 - RNA, 131 nt, synthetic construct
  source 1..131: mol_type = other RNA
ttgccaagtgttccagccacgttttagagctagaaatagcaagttaaaataaggctagtccgttatcaacttgaaaaagtggcaccgagtcggtgcattgccctggggcggtggctggaacacttggtttt

SEQ ID NO: 14792 - RNA, 130 nt, synthetic construct
  source 1..130: mol_type = other RNA
ttgccaagtgttccagccacgttttagagctagaaatagcaagttaaaataaggctagtccgttatcaacttgaaaaagtggcaccgagtcggtgcattgccctggggcggtggctggaacacttgtttt

SEQ ID NO: 14793 - RNA, 122 nt, synthetic construct
  source 1..122: mol_type = other RNA
ttgccaagtgttccagccacgttttagagctagaaatagcaagttaaaataaggctagtccgttatcaacttgaaaaagtggcaccgagtcggtgcgccctgggaaggtggctggaactttt

SEQ ID NO: 14794 - RNA, 129 nt, synthetic construct
  source 1..129: mol_type = other RNA
ttgccaagtgttccagccacgttttagagctagaaatagcaagttaaaataaggctagtccgttatcaacttgaaaaagtggcaccgagtcggtgcattgccctgggtcggtggctggaacactttttt

SEQ ID NO: 14795 - RNA, 129 nt, synthetic construct; identical to SEQ ID NO: 14790
  source 1..129: mol_type = other RNA

SEQ ID NO: 14796 - RNA, 134 nt, synthetic construct
  source 1..134: mol_type = other RNA
ttgccaagtgttccagccacgttttagagctagaaatagcaagttaaaataaggctagtccgttatcaacttgaaaaagtggcaccgagtcggtgcttcattgccctggggcggtggctggaacacttggtttt

SEQ ID NO: 14797 - RNA, 132 nt, synthetic construct
  source 1..132: mol_type = other RNA
ttgccaagtgttccagccacgttttagagctagaaatagcaagttaaaataaggctagtccgttatcaacttgaaaaagtggcaccgagtcggtgcttcattgccctgggtaggtggctggaacactttttt

SEQ ID NO: 14798 - RNA, 132 nt, synthetic construct
  source 1..132: mol_type = other RNA
ttgccaagtgttccagccacgttttagagctagaaatagcaagttaaaataaggctagtccgttatcaacttgaaaaagtggcaccgagtcggtgcttcattgccctgggaaggtggctggaacactttttt

SEQ ID NO: 14799 - RNA, 130 nt, synthetic construct
  source 1..130: mol_type = other RNA
gttgccaagtgttccagccacgttttagagctagaaatagcaagttaaaataaggctagtccgttatcaacttgaaaaagtggcaccgagtcggtgctcattgccctggggcggtggctggaacactttt

SEQ ID NO: 14800 - RNA, 100 nt, synthetic construct
  source 1..100: mol_type = other RNA
ggttgctgtggctgagaagggttttagagctagaaatagcaagttaaaataaggctagtccgttatcaacttgaaaaagtggcaccgagtcggtgctttt

SEQ ID NO: 14801 - RNA, 100 nt, synthetic construct
  source 1..100: mol_type = other RNA
ggtcatcctggtggttgctggttttagagctagaaatagcaagttaaaataaggctagtccgttatcaacttgaaaaagtggcaccgagtcggtgctttt

SEQ ID NO: 14802 - RNA, 100 nt, synthetic construct
  source 1..100: mol_type = other RNA
tgttcattgccctgggccgggttttagagctagaaatagcaagttaaaataaggctagtccgttatcaacttgaaaaagtggcaccgagtcggtgctttt

SEQ ID NO: 14803 - RNA, 100 nt, synthetic construct
  source 1..100: mol_type = other RNA
tgttcattgccctgggacgggttttagagctagaaatagcaagttaaaataaggctagtccgttatcaacttgaaaaagtggcaccgagtcggtgctttt

SEQ ID NO: 14804 - RNA, 100 nt, synthetic construct
  source 1..100: mol_type = other RNA
tgttcattgccctggggagggttttagagctagaaatagcaagttaaaataaggctagtccgttatcaacttgaaaaagtggcaccgagtcggtgctttt

SEQ ID NO: 14805 - RNA, 100 nt, synthetic construct
  source 1..100: mol_type = other RNA
tgttcattgccctgggaagggttttagagctagaaatagcaagttaaaataaggctagtccgttatcaacttgaaaaagtggcaccgagtcggtgctttt

SEQ ID NO: 14806 - RNA, 100 nt, synthetic construct
  source 1..100: mol_type = other RNA
tgttcattgccctgggcagggttttagagctagaaatagcaagttaaaataaggctagtccgttatcaacttgaaaaagtggcaccgagtcggtgctttt

SEQ ID NO: 14807 - RNA, 100 nt, synthetic construct
  source 1..100: mol_type = other RNA
tgttcattgccctggggcgggttttagagctagaaatagcaagttaaaataaggctagtccgttatcaacttgaaaaagtggcaccgagtcggtgctttt

SEQ ID NO: 14808 - RNA, 100 nt, synthetic construct
  source 1..100: mol_type = other RNA
tgttcattgccctgggtcgggttttagagctagaaatagcaagttaaaataaggctagtccgttatcaacttgaaaaagtggcaccgagtcggtgctttt

SEQ ID NO: 14809 - RNA, 100 nt, synthetic construct
  source 1..100: mol_type = other RNA
tgttcattgccctgggtagggttttagagctagaaatagcaagttaaaataaggctagtccgttatcaacttgaaaaagtggcaccgagtcggtgctttt

SEQ ID NO: 14810 - RNA, 100 nt, synthetic construct
  source 1..100: mol_type = other RNA
gggccggtggctggaacactgttttagagctagaaatagcaagttaaaataaggctagtccgttatcaacttgaaaaagtggcaccgagtcggtgctttt

SEQ ID NO: 14811 - RNA, 100 nt, synthetic construct
  source 1..100: mol_type = other RNA
cattgccctgggccggtggcgttttagagctagaaatagcaagttaaaataaggctagtccgttatcaacttgaaaaagtggcaccgagtcggtgctttt

SEQ ID NO: 14812 - RNA, 100 nt, synthetic construct
  source 1..100: mol_type = other RNA
gggtcggtggctggaacactgttttagagctagaaatagcaagttaaaataaggctagtccgttatcaacttgaaaaagtggcaccgagtcggtgctttt

SEQ ID NO: 14813 - RNA, 100 nt, synthetic construct
  source 1..100: mol_type = other RNA
cattgccctgggtcggtggcgttttagagctagaaatagcaagttaaaataaggctagtccgttatcaacttgaaaaagtggcaccgagtcggtgctttt

SEQ ID NO: 14814 - RNA, 100 nt, synthetic construct
  source 1..100: mol_type = other RNA
ggggcggtggctggaacactgttttagagctagaaatagcaagttaaaataaggctagtccgttatcaacttgaaaaagtggcaccgagtcggtgctttt

SEQ ID NO: 14815 - RNA, 100 nt, synthetic construct
  source 1..100: mol_type = other RNA
cattgccctggggcggtggcgttttagagctagaaatagcaagttaaaataaggctagtccgttatcaacttgaaaaagtggcaccgagtcggtgctttt

SEQ ID NO: 14816 - RNA, 100 nt, synthetic construct
  source 1..100: mol_type = other RNA
gggacggtggctggaacactgttttagagctagaaatagcaagttaaaataaggctagtccgttatcaacttgaaaaagtggcaccgagtcggtgctttt

SEQ ID NO: 14817 - RNA, 100 nt, synthetic construct
  source 1..100: mol_type = other RNA
cattgccctgggacggtggcgttttagagctagaaatagcaagttaaaataaggctagtccgttatcaacttgaaaaagtggcaccgagtcggtgctttt

SEQ ID NO: 14818 - RNA, 100 nt, synthetic construct
  source 1..100: mol_type = other RNA
gggcaggtggctggaacactgttttagagctagaaatagcaagttaaaataaggctagtccgttatcaacttgaaaaagtggcaccgagtcggtgctttt

SEQ ID NO: 14819 - RNA, 100 nt, synthetic construct
  source 1..100: mol_type = other RNA
cattgccctgggcaggtggcgttttagagctagaaatagcaagttaaaataaggctagtccgttatcaacttgaaaaagtggcaccgagtcggtgctttt

SEQ ID NO: 14820 - RNA, 100 nt, synthetic construct
  source 1..100: mol_type = other RNA
gggtaggtggctggaacactgttttagagctagaaatagcaagttaaaataaggctagtccgttatcaacttgaaaaagtggcaccgagtcggtgctttt

SEQ ID NO: 14821 - RNA, 100 nt, synthetic construct
  source 1..100: mol_type = other RNA
cattgccctgggtaggtggcgttttagagctagaaatagcaagttaaaataaggctagtccgttatcaacttgaaaaagtggcaccgagtcggtgctttt

SEQ ID NO: 14822 - RNA, 100 nt, synthetic construct
  source 1..100: mol_type = other RNA
ggggaggtggctggaacactgttttagagctagaaatagcaagttaaaataaggctagtccgttatcaacttgaaaaagtggcaccgagtcggtgctttt

SEQ ID NO: 14823 - RNA, 100 nt, synthetic construct
  source 1..100: mol_type = other RNA
cattgccctggggaggtggcgttttagagctagaaatagcaagttaaaataaggctagtccgttatcaacttgaaaaagtggcaccgagtcggtgctttt

SEQ ID NO: 14824 - RNA, 100 nt, synthetic construct
  source 1..100: mol_type = other RNA
gggaaggtggctggaacactgttttagagctagaaatagcaagttaaaataaggctagtccgttatcaacttgaaaaagtggcaccgagtcggtgctttt

SEQ ID NO: 14825 - RNA, 100 nt, synthetic construct
  source 1..100: mol_type = other RNA
cattgccctgggaaggtggcgttttagagctagaaatagcaagttaaaataaggctagtccgttatcaacttgaaaaagtggcaccgagtcggtgctttt

SEQ ID NO: 14826 - protein, 677 aa, unidentified
TLNIEDEHRLHETSKEPDVSLGSTWLSDFPQAWAETGGMGLAVRQAPLIIPLKATSTPVSIKQYPMSQEARLGIKPHIQRLLDQGILVPCQSPWNTPLLPVKKPGTNDYRPVQDLREVNKRVEDIHPTVPNPYNLLSGLPPSHQWYTVLDLKDAFFCLRLHPTSQPLFAFEWRDPEMGISGQLTWTRLPQGFKNSPTLFDEALHRDLADFRIQHPDLILLQYVDDLLLAATSELDCQQGTRALLQTLGNLGYRASAKKAQICQKQVKYLGYLLKEGQRWLTEARKETVMGQPTPKTPRQLREFLGTAGFCRLWIPGFAEMAAPLYPLTKTGTLFNWGPDQQKAYQEIKQALLTAPALGLPDLTKPFELFVDEKQGYAKGVLTQKLGPWRRPVAYLSKKLDPVAAGWPPCLRMVAAIAVLTKDAGKLTMGQPLVILAPHAVEALVKQPPDRWLSNARMTHYQALLLDTDRVQFGPVVALNPATLLPLPEEGLQHNCLDILAEAHGTRPDLTDQPLPDADHTWYTDGSSLLQEGQRKAGAAVTTETEVIWAKALPAGTSAQRAELIALTQALKMAEGKKLNVYTDSRYAFATAHIHGEIYRRRGLLTSEGKEIKNKDEILALLKALFLPKRLSIIHCPGHQKGHSAEARGNRMADQAARKAAITETPDTSTLLIENSSP

SEQ ID NO: 14827 - protein, 677 aa, unidentified
TLNIEDEYRLHETSKEPDVSLGSTWLSDFPQAWAETGGMGLAVRQAPLIIPLKATSTPVSIKQYPMSQEARLGIKPHIQRLLDQGILVPCQSPWNTPLLPVKKPGTNDYRPVQDLREVNKRVEDIHPTVPNPYNLLSGLPPSHQWYTVLDLKDAFFCLRLHPTSQPLFAFEWRDPEMGISGQLTWTRLPQGFKNSPTLFDEALHRDLADFRIQHPDLILLQYVDDLLLAATSELDCQQGTRALLQTLGNLGYRASAKKAQICQKQVKYLGYLLKEGQRWLTEARKETVMGQPTPKTPRQLREFLGTAGFCRLWIPGFAEMAAPLYPLTKTGTLFNWGPDQQKAYQEIKQALLTAPALGLPDLTKPFELFVDEKQGYAKGVLTQKLGPWRRPVAYLSKKLDPVAAGWPPCLRMVAAIAVLTKDAGKLTMGQPLVILAPHAVEALVKQPPDRWLSNARMTHYQALLLDTDRVQFGPVVALNPATLLPLPEEGLQHNCLDILAEAHGTRPDLTDQPLPDADHTWYTDGSSLLQEGQRKAGAAVTTETEVIWAKALPAGTSAQRAELIALTQALKMAEGKKLNVYTDSRYAFATAHIHGEIYRRRGLLTSEGKEIKNKDEILALLKALFLPKRLSIIHCPGHQKGHSAEARGNRMADQAARKAAITETPDTSTLLIENSSP

SEQ ID NO: 14828 - protein, 677 aa, unidentified
TLNIEDEYRLHETSKEPDVSLGSTWLSDFPQAWAETGGMGLAVRQAPLIIPLKATSTPVSIKQYPMSQEARLGIKPHIQRLLDQGILVPCQSPWNTPLLPVKKPGTNDYRPVQDLREVNKRVEDIHPTVPNPYNLLSGLPPSHQWYTVLDLKDAFFCLRLHPTSQPLFAFEWRDPEMGISGQLTWTRLPQGFKNSPTLFNEALHRDLADFRIQHPDLILLQYVDDLLLAATSELDCQQGTRALLQTLGNLGYRASAKKAQICQKQVKYLGYLLKEGQRWLTEARKETVMGQPTPKTPRQLREFLGKAGFCRLFIPGFAEMAAPLYPLTKPGTLFNWGPDQQKAYQEIKQALLTAPALGLPDLTKPFELFVDEKQGYAKGVLTQKLGPWRRPVAYLSKKLDPVAAGWPPCLRMVAAIAVLTKDAGKLTMGQPLVILAPHAVEALVKQPPDRWLSNARMTHYQALLLDTDRVQFGPVVALNPATLLPLPEEGLQHNCLDILAEAHGTRPDLTDQPLPDADHTWYTDGSSLLQEGQRKAGAAVTTETEVIWAKALPAGTSAQRAELIALTQALKMAEGKKLNVYTDSRYAFATAHIHGEIYRRRGWLTSEGKEIKNKDEILALLKALFLPKRLSIIHCPGHQKGHSAEARGNRMADQAARKAAITETPDTSTLLIENSSP

SEQ ID NO: 14829 - protein, 1368 aa, Streptococcus pyogenes [sequence omitted]

SEQ ID NO: 14830 - protein, 1368 aa, synthetic construct
MDKKYSIGLDIGTNSVGWAVITDEYKVPSKKFKVLGNTDRHSIKKNLIGALLFDSGETAEATRLKRTARRRYTRRKNRICYLQEIFSNEMAKVDDSFFHRLEESFLVEEDKKHERHPIFGNIVDEVAYHEKYPTIYHLRKKLVDSTDKADLRLIYLALAHMIKFRGHFLIEGDLNPDNSDVDKLFIQLVQTYNQLFEENPINASGVDAKAILSARLSKSRRLENLIAQLPGEKKNGLFGNLIALSLGLTPNFKSNFDLAEDAKLQLSKDTYDDDLDNLLAQIGDQYADLFLAAKNLSDAILLSDILRVNTEITKAPLSASMIKRYDEHHQDLTLLKALVRQQLPEKYKEIFFDQSKNGYAGYIDGGASQEEFYKFIKPILEKMDGTEELLVKLNREDLLRKQRTFDNGSIPHQIHLGELHAILRRQEDFYPFLKDNREKIEKILTFRIPYYVGPLARGNSRFAWMTRKSEETITPWNFEEVVDKGASAQSFIERMTNFDKNLPNEKVLPKHSLLYEYFTVYNELTKVKYVTEGMRKPAFLSGEQKKAIVDLLFKTNRKVTVKQLKEDYFKKIECFDSVEISGVEDRFNASLGTYHDLLKIIKDKDFLDNEENEDILEDIVLTLTLFEDREMIEERLKTYAHLFDDKVMKQLKRRRYTGWGRLSRKLINGIRDKQSGKTILDFLKSDGFANRNFMQLIHDDSLTFKEDIQKAQVSGQGDSLHEHIANLAGSPAIKKGILQTVKVVDELVKVMGRHKPENIVIEMARENQTTQKGQKNSRERMKRIEEGIKELGSQILKEHPVENTQLQNEKLYLYYLQNGRDMYVDQELDINRLSDYDVDAIVPQSFLKDDSIDNKVLTRSDKNRGKSDNVPSEEVVKKMKNYWRQLLNAKLITQRKFDNLTKAERGGLSELDKAGFIKRQLVETRQITKHVAQILDSRMNTKYDENDKLIREVKVITLKSKLVSDFRKDFQFYKVREINNYHHAHDAYLNAVVGTALIKKYPKLESEFVYGDYKVYDVRKMIAKSEQEIGKATAKYFFYSNIMNFFKTEITLANGEIRKRPLIETNGETGEIVWDKGRDFATVRKVLSMPQVNIVKKTEVQTGGFSKESILPKRNSDKLIARKKDWDPKKYGGFDSPTVAYSVLVVAKVEKGKSKKLKSVKELLGITIMERSSFEKNPIDFLEAKGYKEVKKDLIIKLPKYSLFELENGRKRMLASAGELQKGNELALPSKYVNFLYLASHYEKLKGSPEDNEQKQLFVEQHKHYLDEIIEQISEFSKRVILADANLDKVLSAYNKHRDKPIREQAENIIHLFTLTNLGAPAAFKYFDTTIDRKRYTSTKEVLDATLIHQSITGLYETRIDLSQLGGD

SEQ ID NO: 14831 - protein, 1367 aa, synthetic construct
DKKYSIGLDIGTNSVGWAVITDEYKVPSKKFKVLGNTDRHSIKKNLIGALLFDSGETAEATRLKRTARRRYTRRKNRICYLQEIFSNEMAKVDDSFFHRLEESFLVEEDKKHERHPIFGNIVDEVAYHEKYPTIYHLRKKLVDSTDKADLRLIYLALAHMIKFRGHFLIEGDLNPDNSDVDKLFIQLVQTYNQLFEENPINASGVDAKAILSARLSKSRRLENLIAQLPGEKKNGLFGNLIALSLGLTPNFKSNFDLAEDAKLQLSKDTYDDDLDNLLAQIGDQYADLFLAAKNLSDAILLSDILRVNTEITKAPLSASMIKRYDEHHQDLTLLKALVRQQLPEKYKEIFFDQSKNGYAGYIDGGASQEEFYKFIKPILEKMDGTEELLVKLNREDLLRKQRTFDNGSIPHQIHLGELHAILRRQEDFYPFLKDNREKIEKILTFRIPYYVGPLARGNSRFAWMTRKSEETITPWNFEEVVDKGASAQSFIERMTNFDKNLPNEKVLPKHSLLYEYFTVYNELTKVKYVTEGMRKPAFLSGEQKKAIVDLLFKTNRKVTVKQLKEDYFKKIECFDSVEISGVEDRFNASLGTYHDLLKIIKDKDFLDNEENEDILEDIVLTLTLFEDREMIEERLKTYAHLFDDKVMKQLKRRRYTGWGRLSRKLINGIRDKQSGKTILDFLKSDGFANRNFMQLIHDDSLTFKEDIQKAQVSGQGDSLHEHIANLAGSPAIKKGILQTVKVVDELVKVMGRHKPENIVIEMARENQTTQKGQKNSRERMKRIEEGIKELGSQILKEHPVENTQLQNEKLYLYYLQNGRDMYVDQELDINRLSDYDVDAIVPQSFLKDDSIDNKVLTRSDKNRGKSDNVPSEEVVKKMKNYWRQLLNAKLITQRKFDNLTKAERGGLSELDKAGFIKRQLVETRQITKHVAQILDSRMNTKYDENDKLIREVKVITLKSKLVSDFRKDFQFYKVREINNYHHAHDAYLNAVVGTALIKKYPKLESEFVYGDYKVYDVRKMIAKSEQEIGKATAKYFFYSNIMNFFKTEITLANGEIRKRPLIETNGETGEIVWDKGRDFATVRKVLSMPQVNIVKKTEVQTGGFSKESILPKRNSDKLIARKKDWDPKKYGGFDSPTVAYSVLVVAKVEKGKSKKLKSVKELLGITIMERSSFEKNPIDFLEAKGYKEVKKDLIIKLPKYSLFELENGRKRMLASAGELQKGNELALPSKYVNFLYLASHYEKLKGSPEDNEQKQLFVEQHKHYLDEIIEQISEFSKRVILADANLDKVLSAYNKHRDKPIREQAENIIHLFTLTNLGAPAAFKYFDTTIDRKRYTSTKEVLDATLIHQSITGLYETRIDLSQLGGD

SEQ ID NO: 14832 - protein, 1054 aa, Staphylococcus lugdunensis
MNQKFILGLDIGITSVGYGLIDYETKNIIDAGVRLFPEANVENNEGRRSKRGSRRLKRRRIHRLERVKKLLEDYNLLDQSQIPQSTNPYAIRVKGLSEALSKDELVIALLHIAKRRGIHKIDVIDSNDDVGNELSTKEQLNKNSKLLKDKFVCQIQLERMNEGQVRGEKNRFKTADIIKEIIQLLNVQKNFHQLDENFINKYIELVEMRREYFEGPGKGSPYGWEGDPKAWYETLMGHCTYFPDELRSVKYAYSADLFNALNDLNNLVIQRDGLSKLEYHEKYHIIENVFKQKKKPTLKQIANEINVNPEDIKGYRITKSGKPQFTEFKLYHDLKSVLFDQSILENEDVLDQIAEILTIYQDKDSIKSKLTELDILLNEEDKENIAQLTGYTGTHRLSLKCIRLVLEEQWYSSRNQMEIFTHLNIKPKKINLTAANKIPKAMIDEFILSPVVKRTFGQAINLINKIIEKYGVPEDIIIELARENNSKDKQKFINEMQKKNENTRKRINEIIGKYGNQNAKRLVEKIRLHDEQEGKCLYSLESIPLEDLLNNPNHYEVDHIIPRSVSFDNSYHNKVLVKQSENSKKSNLTPYQYFNSGKSKLSYNQFKQHILNLSKSQDRISKKKKEYLLEERDINKFEVQKEFINRNLVDTRYATRELTNYLKAYFSANNMNVKVKTINGSFTDYLRKVWKFKKERNHGYKHHAEDALIIANADFLFKENKKLKAVNSVLEKPEIESKQLDIQVDSEDNYSEMFIIPKQVQDIKDFRNFKYSHRVDKKPNRQLINDTLYSTRKKDNSTYIVQTIKDIYAKDNTTLKKQFDKSPEKFLMYQHDPRTFEKLEVIMKQYANEKNPLAKYHEETGEYLTKYSKKNNGPIVKSLKYIGNKLGSHLDVTHQFKSSTKKLVKLSIKPYRFDVYLTDKGYKFITISYLDVLKKDNYYYIPEQKYDKLKLGKAIDKNAKFIASFYKNDLIKLDGEIYKIIGVNSDTRNMIELDLPDIRYKEYCELNNIKGEPRIKKTIGKKVNSIEKLTTDVLGNVFTNTQYTKPQLLFKRGN

SEQ ID NO: 14833 - protein, 1054 aa, synthetic construct
MNQKFILGLDIGITSVGYGLIDYETKNIIDAGVRLFPEANVENNEGRRSKRGSRRLKRRRIHRLERVKKLLEDYNLLDQSQIPQSTNPYAIRVKGLSEALSKDELVIALLHIAKRRGIHKIDVIDSNDDVGNELSTKEQLNKNSKLLKDKFVCQIQLERMNEGQVRGEKNRFKTADIIKEIIQLLNVQKNFHQLDENFINKYIELVEMRREYFEGPGKGSPYGWEGDPKAWYETLMGHCTYFPDELRSVKYAYSADLFNALNDLNNLVIQRDGLSKLEYHEKYHIIENVFKQKKKPTLKQIANEINVNPEDIKGYRITKSGKPQFTEFKLYHDLKSVLFDQSILENEDVLDQIAEILTIYQDKDSIKSKLTELDILLNEEDKENIAQLTGYTGTHRLSLKCIRLVLEEQWYSSRNQMEIFTHLNIKPKKINLTAANKIPKAMIDEFILSPVVKRTFGQAINLINKIIEKYGVPEDIIIELARENNSKDKQKFINEMQKKNENTRKRINEIIGKYGNQNAKRLVEKIRLHDEQEGKCLYSLESIPLEDLLNNPNHYEVDHIIPRSVSFDNSYHNKVLVKQSEASKKSNLTPYQYFNSGKSKLSYNQFKQHILNLSKSQDRISKKKKEYLLEERDINKFEVQKEFINRNLVDTRYATRELTNYLKAYFSANNMNVKVKTINGSFTDYLRKVWKFKKERNHGYKHHAEDALIIANADFLFKENKKLKAVNSVLEKPEIESKQLDIQVDSEDNYSEMFIIPKQVQDIKDFRNFKYSHRVDKKPNRQLINDTLYSTRKKDNSTYIVQTIKDIYAKDNTTLKKQFDKSPEKFLMYQHDPRTFEKLEVIMKQYANEKNPLAKYHEETGEYLTKYSKKNNGPIVKSLKYIGNKLGSHLDVTHQFKSSTKKLVKLSIKPYRFDVYLTDKGYKFITISYLDVLKKDNYYYIPEQKYDKLKLGKAIDKNAKFIASFYKNDLIKLDGEIYKIIGVNSDTRNMIELDLPDIRYKEYCELNNIKGEPRIKKTIGKKVNSIEKLTTDVLGNVFTNTQYTKPQLLFKRGN

SEQ ID NO: 14834 - protein, 1053 aa, synthetic construct
NQKFILGLDIGITSVGYGLIDYETKNIIDAGVRLFPEANVENNEGRRSKRGSRRLKRRRIHRLERVKKLLEDYNLLDQSQIPQSTNPYAIRVKGLSEALSKDELVIALLHIAKRRGIHKIDVIDSNDDVGNELSTKEQLNKNSKLLKDKFVCQIQLERMNEGQVRGEKNRFKTADIIKEIIQLLNVQKNFHQLDENFINKYIELVEMRREYFEGPGKGSPYGWEGDPKAWYETLMGHCTYFPDELRSVKYAYSADLFNALNDLNNLVIQRDGLSKLEYHEKYHIIENVFKQKKKPTLKQIANEINVNPEDIKGYRITKSGKPQFTEFKLYHDLKSVLFDQSILENEDVLDQIAEILTIYQDKDSIKSKLTELDILLNEEDKENIAQLTGYTGTHRLSLKCIRLVLEEQWYSSRNQMEIFTHLNIKPKKINLTAANKIPKAMIDEFILSPVVKRTFGQAINLINKIIEKYGVPEDIIIELARENNSKDKQKFINEMQKKNENTRKRINEIIGKYGNQNAKRLVEKIRLHDEQEGKCLYSLESIPLEDLLNNPNHYEVDHIIPRSVSFDNSYHNKVLVKQSEASKKSNLTPYQYFNSGKSKLSYNQFKQHILNLSKSQDRISKKKKEYLLEERDINKFEVQKEFINRNLVDTRYATRELTNYLKAYFSANNMNVKVKTINGSFTDYLRKVWKFKKERNHGYKHHAEDALIIANADFLFKENKKLKAVNSVLEKPEIESKQLDIQVDSEDNYSEMFIIPKQVQDIKDFRNFKYSHRVDKKPNRQLINDTLYSTRKKDNSTYIVQTIKDIYAKDNTTLKKQFDKSPEKFLMYQHDPRTFEKLEVIMKQYANEKNPLAKYHEETGEYLTKYSKKNNGPIVKSLKYIGNKLGSHLDVTHQFKSSTKKLVKLSIKPYRFDVYLTDKGYKFITISYLDVLKKDNYYYIPEQKYDKLKLGKAIDKNAKFIASFYKNDLIKLDGEIYKIIGVNSDTRNMIELDLPDIRYKEYCELNNIKGEPRIKKTIGKKVNSIEKLTTDVLGNVFTNTQYTKPQLLFKRGN

SEQ ID NO: 14835 - protein, 1053 aa, Staphylococcus aureus
MKRNYILGLDIGITSVGYGIIDYETRDVIDAGVRLFKEANVENNEGRRSKRGARRLKRRRRHRIQRVKKLLFDYNLLTDHSELSGINPYEARVKGLSQKLSEEEFSAALLHLAKRRGVHNVNEVEEDTGNELSTKEQISRNSKALEEKYVAELQLERLKKDGEVRGSINRFKTSDYVKEAKQLLKVQKAYHQLDQSFIDTYIDLLETRRTYYEGPGEGSPFGWKDIKEWYEMLMGHCTYFPEELRSVKYAYNADLYNALNDLNNLVITRDENEKLEYYEKFQIIENVFKQKKKPTLKQIAKEILVNEEDIKGYRVTSTGKPEFTNLKVYHDIKDITARKEIIENAELLDQIAKILTIYQSSEDIQEELTNLNSELTQEEIEQISNLKGYTGTHNLSLKAINLILDELWHTNDNQIAIFNRLKLVPKKVDLSQQKEIPTTLVDDFILSPVVKRSFIQSIKVINAIIKKYGLPNDIIIELAREKNSKDAQKMINEMQKRNRQTNERIEEIIRTTGKENAKYLIEKIKLHDMQEGKCLYSLEAIPLEDLLNNPFNYEVDHIIPRSVSFDNSFNNKVLVKQEENSKKGNRTPFQYLSSSDSKISYETFKKHILNLAKGKGRISKTKKEYLLEERDINRFSVQKDFINRNLVDTRYATRGLMNLLRSYFRVNNLDVKVKSINGGFTSFLRRKWKFKKERNKGYKHHAEDALIIANADFIFKEWKKLDKAKKVMENQMFEEKQAESMPEIETEQEYKEIFITPHQIKHIKDFKDYKYSHRVDKKPNRELINDTLYSTRKDDKGNTLIVNNLNGLYDKDNDKLKKLINKSPEKLLMYHHDPQTYQKLKLIMEQYGDEKNPLYKYYEETGNYLTKYSKKDNGPVIKKIKYYGNKLNAHLDITDDYPNSRNKVVKLSLKPYRFDVYLDNGVYKFVTVKNLDVIKKENYYEVNSKCYEEAKKLKKISNQAEFIASFYNNDLIKINGELYRVIGVNNDLLNRIEVNMIDITYREYLENMNDKRPPRIIKTIASKTQSIKKYSTDILGNLYEVKSKKHPQIIKKG

SEQ ID NO: 14836 - protein, 1053 aa, synthetic construct
MKRNYILGLDIGITSVGYGIIDYETRDVIDAGVRLFKEANVENNEGRRSKRGARRLKRRRRHRIQRVKKLLFDYNLLTDHSELSGINPYEARVKGLSQKLSEEEFSAALLHLAKRRGVHNVNEVEEDTGNELSTKEQISRNSKALEEKYVAELQLERLKKDGEVRGSINRFKTSDYVKEAKQLLKVQKAYHQLDQSFIDTYIDLLETRRTYYEGPGEGSPFGWKDIKEWYEMLMGHCTYFPEELRSVKYAYNADLYNALNDLNNLVITRDENEKLEYYEKFQIIENVFKQKKKPTLKQIAKEILVNEEDIKGYRVTSTGKPEFTNLKVYHDIKDITARKEIIENAELLDQIAKILTIYQSSEDIQEELTNLNSELTQEEIEQISNLKGYTGTHNLSLKAINLILDELWHTNDNQIAIFNRLKLVPKKVDLSQQKEIPTTLVDDFILSPVVKRSFIQSIKVINAIIKKYGLPNDIIIELAREKNSKDAQKMINEMQKRNRQTNERIEEIIRTTGKENAKYLIEKIKLHDMQEGKCLYSLEAIPLEDLLNNPFNYEVDHIIPRSVSFDNSFNNKVLVKQEEASKKGNRTPFQYLSSSDSKISYETFKKHILNLAKGKGRISKTKKEYLLEERDINRFSVQKDFINRNLVDTRYATRGLMNLLRSYFRVNNLDVKVKSINGGFTSFLRRKWKFKKERNKGYKHHAEDALIIANADFIFKEWKKLDKAKKVMENQMFEEKQAESMPEIETEQEYKEIFITPHQIKHIKDFKDYKYSHRVDKKPNRELINDTLYSTRKDDKGNTLIVNNLNGLYDKDNDKLKKLINKSPEKLLMYHHDPQTYQKLKLIMEQYGDEKNPLYKYYEETGNYLTKYSKKDNGPVIKKIKYYGNKLNAHLDITDDYPNSRNKVVKLSLKPYRFDVYLDNGVYKFVTVKNLDVIKKENYYEVNSKCYEEAKKLKKISNQAEFIASFYNNDLIKINGELYRVIGVNNDLLNRIEVNMIDITYREYLENMNDKRPPRIIKTIASKTQSIKKYSTDILGNLYEVKSKKHPQIIKKG

SEQ ID NO: 14837 - protein, 1052 aa, synthetic construct
KRNYILGLDIGITSVGYGIIDYETRDVIDAGVRLFKEANVENNEGRRSKRGARRLKRRRRHRIQRVKKLLFDYNLLTDHSELSGINPYEARVKGLSQKLSEEEFSAALLHLAKRRGVHNVNEVEEDTGNELSTKEQISRNSKALEEKYVAELQLERLKKDGEVRGSINRFKTSDYVKEAKQLLKVQKAYHQLDQSFIDTYIDLLETRRTYYEGPGEGSPFGWKDIKEWYEMLMGHCTYFPEELRSVKYAYNADLYNALNDLNNLVITRDENEKLEYYEKFQIIENVFKQKKKPTLKQIAKEILVNEEDIKGYRVTSTGKPEFTNLKVYHDIKDITARKEIIENAELLDQIAKILTIYQSSEDIQEELTNLNSELTQEEIEQISNLKGYTGTHNLSLKAINLILDELWHTNDNQIAIFNRLKLVPKKVDLSQQKEIPTTLVDDFILSPVVKRSFIQSIKVINAIIKKYGLPNDIIIELAREKNSKDAQKMINEMQKRNRQTNERIEEIIRTTGKENAKYLIEKIKLHDMQEGKCLYSLEAIPLEDLLNNPFNYEVDHIIPRSVSFDNSFNNKVLVKQEEASKKGNRTPFQYLSSSDSKISYETFKKHILNLAKGKGRISKTKKEYLLEERDINRFSVQKDFINRNLVDTRYATRGLMNLLRSYFRVNNLDVKVKSINGGFTSFLRRKWKFKKERNKGYKHHAEDALIIANADFIFKEWKKLDKAKKVMENQMFEEKQAESMPEIETEQEYKEIFITPHQIKHIKDFKDYKYSHRVDKKPNRELINDTLYSTRKDDKGNTLIVNNLNGLYDKDNDKLKKLINKSPEKLLMYHHDPQTYQKLKLIMEQYGDEKNPLYKYYEETGNYLTKYSKKDNGPVIKKIKYYGNKLNAHLDITDDYPNSRNKVVKLSLKPYRFDVYLDNGVYKFVTVKNLDVIKKENYYEVNSKCYEEAKKLKKISNQAEFIASFYNNDLIKINGELYRVIGVNNDLLNRIEVNMIDITYREYLENMNDKRPPRIIKTIASKTQSIKKYSTDILGNLYEVKSKKHPQIIKKG

SEQ ID NO: 14838 - protein, 1368 aa, synthetic construct
MDKKYSIGLDIGTNSVGWAVITDEYKVPSKKFKVLGNTDRHSIKKNLIGALLFDSGETAEATRLKRTARRRYTRRKNRICYLQEIFSNEMAKVDDSFFHRLEESFLVEEDKKHERHPIFGNIVDEVAYHEKYPTIYHLRKKLVDSTDKADLRLIYLALAHMIKFRGHFLIEGDLNPDNSDVDKLFIQLVQTYNQLFEENPINASGVDAKAILSARLSKSRRLENLIAQLPGEKKNGLFGNLIALSLGLTPNFKSNFDLAEDAKLQLSKDTYDDDLDNLLAQIGDQYADLFLAAKNLSDAILLSDILRVNTEITKAPLSASMIKRYDEHHQDLTLLKALVRQQLPEKYKEIFFDQSKNGYAGYIDGGASQEEFYKFIKPILEKMDGTEELLVKLNREDLLRKQRTFDNGSIPHQIHLGELHAILRRQEDFYPFLKDNREKIEKILTFRIPYYVGPLARGNSRFAWMTRKSEETITPWNFEEVVDKGASAQSFIERMTNFDKNLPNEKVLPKHSLLYEYFTVYNELTKVKYVTEGMRKPAFLSGEQKKAIVDLLFKTNRKVTVKQLKEDYFKKIECFDSVEISGVEDRFNASLGTYHDLLKIIKDKDFLDNEENEDILEDIVLTLTLFEDREMIEERLKTYAHLFDDKVMKQLKRRRYTGWGRLSRKLINGIRDKQSGKTILDFLKSDGFANRNFMQLIHDDSLTFKEDIQKAQVSGQGDSLHEHIANLAGSPAIKKGILQTVKVVDELVKVMGRHKPENIVIEMARENQTTQKGQKNSRERMKRIEEGIKELGSQILKEHPVENTQLQNEKLYLYYLQNGRDMYVDQELDINRLSDYDVDHIVPQSFLKDDSIDNKVLTRSDKNRGKSDNVPSEEVVKKMKNYWRQLLNAKLITQRKFDNLTKAERGGLSELDKAGFIKRQLVETRQITKHVAQILDSRMNTKYDENDKLIREVKVITLKSKLVSDFRKDFQFYKVREINNYHHAHDAYLNAVVGTALIKKYPKLESEFVYGDYKVYDVRKMIAKSEQEIGKATAKYFFYSNIMNFFKTEITLANGEIRKRPLIETNGETGEIVWDKGRDFATVRKVLSMPQVNIVKKTEVQTGGFSKESIRPKRNSDKLIARKKDWDPKKYGGFVSPTVAYSVLVVAKVEKGKSKKLKSVKELLGITIMERSSFEKNPIDFLEAKGYKEVKKDLIIKLPKYSLFELENGRKRMLASARFLQKGNELALPSKYVNFLYLASHYEKLKGSPEDNEQKQLFVEQHKHYLDEIIEQISEFSKRVILADANLDKVLSAYNKHRDKPIREQAENIIHLFTLTNLGAPRAFKYFDTTIDRKVYRSTKEVLDATLIHQSITGLYETRIDLSQLGGD

SEQ ID NO: 14839 - protein, 1368 aa, synthetic construct
MDKKYSIGLDIGTNSVGWAVITDEYKVPSKKFKVLGNTDRHSIKKNLIGALLFDSGETAEATRLKRTARRRYTRRKNRICYLQEIFSNEMAKVDDSFFHRLEESFLVEEDKKHERHPIFGNIVDEVAYHEKYPTIYHLRKKLVDSTDKADLRLIYLALAHMIKFRGHFLIEGDLNPDNSDVDKLFIQLVQTYNQLFEENPINASGVDAKAILSARLSKSRRLENLIAQLPGEKKNGLFGNLIALSLGLTPNFKSNFDLAEDAKLQLSKDTYDDDLDNLLAQIGDQYADLFLAAKNLSDAILLSDILRVNTEITKAPLSASMIKRYDEHHQDLTLLKALVRQQLPEKYKEIFFDQSKNGYAGYIDGGASQEEFYKFIKPILEKMDGTEELLVKLNREDLLRKQRTFDNGSIPHQIHLGELHAILRRQEDFYPFLKDNREKIEKILTFRIPYYVGPLARGNSRFAWMTRKSEETITPWNFEEVVDKGASAQSFIERMTNFDKNLPNEKVLPKHSLLYEYFTVYNELTKVKYVTEGMRKPAFLSGEQKKAIVDLLFKTNRKVTVKQLKEDYFKKIECFDSVEISGVEDRFNASLGTYHDLLKIIKDKDFLDNEENEDILEDIVLTLTLFEDREMIEERLKTYAHLFDDKVMKQLKRRRYTGWGRLSRKLINGIRDKQSGKTILDFLKSDGFANRNFMQLIHDDSLTFKEDIQKAQVSGQGDSLHEHIANLAGSPAIKKGILQTVKVVDELVKVMGRHKPENIVIEMARENQTTQKGQKNSRERMKRIEEGIKELGSQILKEHPVENTQLQNEKLYLYYLQNGRDMYVDQELDINRLSDYDVDAIVPQSFLKDDSIDNKVLTRSDKNRGKSDNVPSEEVVKKMKNYWRQLLNAKLITQRKFDNLTKAERGGLSELDKAGFIKRQLVETRQITKHVAQILDSRMNTKYDENDKLIREVKVITLKSKLVSDFRKDFQFYKVREINNYHHAHDAYLNAVVGTALIKKYPKLESEFVYGDYKVYDVRKMIAKSEQEIGKATAKYFFYSNIMNFFKTEITLANGEIRKRPLIETNGETGEIVWDKGRDFATVRKVLSMPQVNIVKKTEVQTGGFSKESIRPKRNSDKLIARKKDWDPKKYGGFVSPTVAYSVLVVAKVEKGKSKKLKSVKELLGITIMERSSFEKNPIDFLEAKGYKEVKKDLIIKLPKYSLFELENGRKRMLASARFLQKGNELALPSKYVNFLYLASHYEKLKGSPEDNEQKQLFVEQHKHYLDEIIEQISEFSKRVILADANLDKVLSAYNKHRDKPIREQAENIIHLFTLTNLGAPRAFKYFDTTIDRKVYRSTKEVLDATLIHQSITGLYETRIDLSQLGGD

SEQ ID NO: 14840 - protein, 1367 aa, synthetic construct
DKKYSIGLDIGTNSVGWAVITDEYKVPSKKFKVLGNTDRHSIKKNLIGALLFDSGETAEATRLKRTARRRYTRRKNRICYLQEIFSNEMAKVDDSFFHRLEESFLVEEDKKHERHPIFGNIVDEVAYHEKYPTIYHLRKKLVDSTDKADLRLIYLALAHMIKFRGHFLIEGDLNPDNSDVDKLFIQLVQTYNQLFEENPINASGVDAKAILSARLSKSRRLENLIAQLPGEKKNGLFGNLIALSLGLTPNFKSNFDLAEDAKLQLSKDTYDDDLDNLLAQIGDQYADLFLAAKNLSDAILLSDILRVNTEITKAPLSASMIKRYDEHHQDLTLLKALVRQQLPEKYKEIFFDQSKNGYAGYIDGGASQEEFYKFIKPILEKMDGTEELLVKLNREDLLRKQRTFDNGSIPHQIHLGELHAILRRQEDFYPFLKDNREKIEKILTFRIPYYVGPLARGNSRFAWMTRKSEETITPWNFEEVVDKGASAQSFIERMTNFDKNLPNEKVLPKHSLLYEYFTVYNELTKVKYVTEGMRKPAFLSGEQKKAIVDLLFKTNRKVTVKQLKEDYFKKIECFDSVEISGVEDRFNASLGTYHDLLKIIKDKDFLDNEENEDILEDIVLTLTLFEDREMIEERLKTYAHLFDDKVMKQLKRRRYTGWGRLSRKLINGIRDKQSGKTILDFLKSDGFANRNFMQLIHDDSLTFKEDIQKAQVSGQGDSLHEHIANLAGSPAIKKGILQTVKVVDELVKVMGRHKPENIVIEMARENQTTQKGQKNSRERMKRIEEGIKELGSQILKEHPVENTQLQNEKLYLYYLQNGRDMYVDQELDINRLSDYDVDAIVPQSFLKDDSIDNKVLTRSDKNRGKSDNVPSEEVVKKMKNYWRQLLNAKLITQRKFDNLTKAERGGLSELDKAGFIKRQLVETRQITKHVAQILDSRMNTKYDENDKLIREVKVITLKSKLVSDFRKDFQFYKVREINNYHHAHDAYLNAVVGTALIKKYPKLESEFVYGDYKVYDVRKMIAKSEQEIGKATAKYFFYSNIMNFFKTEITLANGEIRKRPLIETNGETGEIVWDKGRDFATVRKVLSMPQVNIVKKTEVQTGGFSKESIRPKRNSDKLIARKKDWDPKKYGGFVSPTVAYSVLVVAKVEKGKSKKLKSVKELLGITIMERSSFEKNPIDFLEAKGYKEVKKDLIIKLPKYSLFELENGRKRMLASARFLQKGNELALPSKYVNFLYLASHYEKLKGSPEDNEQKQLFVEQHKHYLDEIIEQISEFSKRVILADANLDKVLSAYNKHRDKPIREQAENIIHLFTLTNLGAPRAFKYFDTTIDRKVYRSTKEVLDATLIHQSITGLYETRIDLSQLGGD

SEQ ID NO: 14841 - protein, 1368 aa, synthetic construct
MDKKYSIGLDIGTNSVGWAVITDEYKVPSKKFKVLGNTDRHSIKKNLIGALLFDSGETAEATRLKRTARRRYTRRKNRICYLQEIFSNEMAKVDDSFFHRLEESFLVEEDKKHERHPIFGNIVDEVAYHEKYPTIYHLRKKLVDSTDKADLRLIYLALAHMIKFRGHFLIEGDLNPDNSDVDKLFIQLVQTYNQLFEENPINASGVDAKAILSARLSKSRRLENLIAQLPGEKKNGLFGNLIALSLGLTPNFKSNFDLAEDAKLQLSKDTYDDDLDNLLAQIGDQYADLFLAAKNLSDAILLSDILRVNTEITKAPLSASMIKRYDEHHQDLTLLKALVRQQLPEKYKEIFFDQSKNGYAGYIDGGASQEEFYKFIKPILEKMDGTEELLVKLNREDLLRKQRTFDNGSIPHQIHLGELHAILRRQEDFYPFLKDNREKIEKILTFRIPYYVGPLARGNSRFAWMTRKSEETITPWNFEEVVDKGASAQSFIERMTNFDKNLPNEKVLPKHSLLYEYFTVYNELTKVKYVTEGMRKPAFLSGEQKKAIVDLLFKTNRKVTVKQLKEDYFKKIECFDSVEISGVEDRFNASLGTYHDLLKIIKDKDFLDNEENEDILEDIVLTLTLFEDREMIEERLKTYAHLFDDKVMKQLKRRRYTGWGRLSRKLINGIRDKQSGKTILDFLKSDGFANRNFMQLIHDDSLTFKEDIQKAQVSGQGDSLHEHIANLAGSPAIKKGILQTVKVVDELVKVMGRHKPENIVIEMARENQTTQKGQKNSRERMKRIEEGIKELGSQILKEHPVENTQLQNEKLYLYYLQNGRDMYVDQELDINRLSDYDVDHIVPQSFLKDDSIDNKVLTRSDKNRGKSDNVPSEEVVKKMKNYWRQLLNAKLITQRKFDNLTKAERGGLSELDKAGFIKRQLVETRQITKHVAQILDSRMNTKYDENDKLIREVKVITLKSKLVSDFRKDFQFYKVREINNYHHAHDAYLNAVVGTALIKKYPKLESEFVYGDYKVYDVRKMIAKSEQEIGKATAKYFFYSNIMNFFKTEITLANGEIRKRPLIETNGETGEIVWDKGRDFATVRKVLSMPQVNIVKKTEVQTGGFSKESILPKRNSDKLIARKKDWDPKKYGGFVSPTVAYSVLVVAKVEKGKSKKLKSVKELLGITIMERSSFEKNPIDFLEAKGYKEVKKDLIIKLPKYSLFELENGRKRMLASARELQKGNELALPSKYVNFLYLASHYEKLKGSPEDNEQKQLFVEQHKHYLDEIIEQISEFSKRVILADANLDKVLSAYNKHRDKPIREQAENIIHLFTLTNLGAPAAFKYFDTTIDRKQYRSTKEVLDATLIHQSITGLYETRIDLSQLGGD

SEQ ID NO: 14842 - protein, 1368 aa, synthetic construct
MDKKYSIGLDIGTNSVGWAVITDEYKVPSKKFKVLGNTDRHSIKKNLIGALLFDSGETAEATRLKRTARRRYTRRKNRICYLQEIFSNEMAKVDDSFFHRLEESFLVEEDKKHERHPIFGNIVDEVAYHEKYPTIYHLRKKLVDSTDKADLRLIYLALAHMIKFRGHFLIEGDLNPDNSDVDKLFIQLVQTYNQLFEENPINASGVDAKAILSARLSKSRRLENLIAQLPGEKKNGLFGNLIALSLGLTPNFKSNFDLAEDAKLQLSKDTYDDDLDNLLAQIGDQYADLFLAAKNLSDAILLSDILRVNTEITKAPLSASMIKRYDEHHQDLTLLKALVRQQLPEKYKEIFFDQSKNGYAGYIDGGASQEEFYKFIKPILEKMDGTEELLVKLNREDLLRKQRTFDNGSIPHQIHLGELHAILRRQEDFYPFLKDNREKIEKILTFRIPYYVGPLARGNSRFAWMTRKSEETITPWNFEEVVDKGASAQSFIERMTNFDKNLPNEKVLPKHSLLYEYFTVYNELTKVKYVTEGMRKPAFLSGEQKKAIVDLLFKTNRKVTVKQLKEDYFKKIECFDSVEISGVEDRFNASLGTYHDLLKIIKDKDFLDNEENEDILEDIVLTLTLFEDREMIEERLKTYAHLFDDKVMKQLKRRRYTGWGRLSRKLINGIRDKQSGKTILDFLKSDGFANRNFMQLIHDDSLTFKEDIQKAQVSGQGDSLHEHIANLAGSPAIKKGILQTVKVVDELVKVMGRHKPENIVIEMARENQTTQKGQKNSRERMKRIEEGIKELGSQILKEHPVENTQLQNEKLYLYYLQNGRDMYVDQELDINRLSDYDVDAIVPQSFLKDDSIDNKVLTRSDKNRGKSDNVPSEEVVKKMKNYWRQLLNAKLITQRKFDNLTKAERGGLSELDKAGFIKRQLVETRQITKHVAQILDSRMNTKYDENDKLIREVKVITLKSKLVSDFRKDFQFYKVREINNYHHAHDAYLNAVVGTALIKKYPKLESEFVYGDYKVYDVRKMIAKSEQEIGKATAKYFFYSNIMNFFKTEITLANGEIRKRPLIETNGETGEIVWDKGRDFATVRKVLSMPQVNIVKKTEVQTGGFSKESILPKRNSDKLIARKKDWDPKKYGGFVSPTVAYSVLVVAKVEKGKSKKLKSVKELLGITIMERSSFEKNPIDFLEAKGYKEVKKDLIIKLPKYSLFELENGRKRMLASARELQKGNELALPSKYVNFLYLASHYEKLKGSPEDNEQKQLFVEQHKHYLDEIIEQISEFSKRVILADANLDKVLSAYNKHRDKPIREQAENIIHLFTLTNLGAPAAFKYFDTTIDRKQYRSTKEVLDATLIHQSITGLYETRIDLSQLGGD

SEQ ID NO: 14843 - protein, 1367 aa, synthetic construct
DKKYSIGLDIGTNSVGWAVITDEYKVPSKKFKVLGNTDRHSIKKNLIGALLFDSGETAEATRLKRTARRRYTRRKNRICYLQEIFSNEMAKVDDSFFHRLEESFLVEEDKKHERHPIFGNIVDEVAYHEKYPTIYHLRKKLVDSTDKADLRLIYLALAHMIKFRGHFLIEGDLNPDNSDVDKLFIQLVQTYNQLFEENPINASGVDAKAILSARLSKSRRLENLIAQLPGEKKNGLFGNLIALSLGLTPNFKSNFDLAEDAKLQLSKDTYDDDLDNLLAQIGDQYADLFLAAKNLSDAILLSDILRVNTEITKAPLSASMIKRYDEHHQDLTLLKALVRQQLPEKYKEIFFDQSKNGYAGYIDGGASQEEFYKFIKPILEKMDGTEELLVKLNREDLLRKQRTFDNGSIPHQIHLGELHAILRRQEDFYPFLKDNREKIEKILTFRIPYYVGPLARGNSRFAWMTRKSEETITPWNFEEVVDKGASAQSFIERMTNFDKNLPNEKVLPKHSLLYEYFTVYNELTKVKYVTEGMRKPAFLSGEQKKAIVDLLFKTNRKVTVKQLKEDYFKKIECFDSVEISGVEDRFNASLGTYHDLLKIIKDKDFLDNEENEDILEDIVLTLTLFEDREMIEERLKTYAHLFDDKVMKQLKRRRYTGWGRLSRKLINGIRDKQSGKTILDFLKSDGFANRNFMQLIHDDSLTFKEDIQKAQVSGQGDSLHEHIANLAGSPAIKKGILQTVKVVDELVKVMGRHKPENIVIEMARENQTTQKGQKNSRERMKRIEEGIKELGSQILKEHPVENTQLQNEKLYLYYLQNGRDMYVDQELDINRLSDYDVDAIVPQSFLKDDSIDNKVLTRSDKNRGKSDNVPSEEVVKKMKNYWRQLLNAKLITQRKFDNLTKAERGGLSELDKAGFIKRQLVETRQITKHVAQILDSRMNTKYDENDKLIREVKVITLKSKLVSDFRKDFQFYKVREINNYHHAHDAYLNAVVGTALIKKYPKLESEFVYGDYKVYDVRKMIAKSEQEIGKATAKYFFYSNIMNFFKTEITLANGEIRKRPLIETNGETGEIVWDKGRDFATVRKVLSMPQVNIVKKTEVQTGGFSKESILPKRNSDKLIARKKDWDPKKYGGFVSPTVAYSVLVVAKVEKGKSKKLKSVKELLGITIMERSSFEKNPIDFLEAKGYKEVKKDLIIKLPKYSLFELENGRKRMLASARELQKGNELALPSKYVNFLYLASHYEKLKGSPEDNEQKQLFVEQHKHYLDEIIEQISEFSKRVILADANLDKVLSAYNKHRDKPIREQAENIIHLFTLTNLGAPAAFKYFDTTIDRKQYRSTKEVLDATLIHQSITGLYETRIDLSQLGGD

SEQ ID NO: 14844 - protein, 1368 aa, synthetic construct
MDKKYSIGLDIGTNSVGWAVITDEYKVPSKKFKVLGNTDRHSIKKNLIGALLFDSGETAERTRLKRTARRRYTRRKNRICYLQEIFSNEMAKVDDSFFHRLEESFLVEEDKKHERHPIFGNIVDEVAYHEKYPTIYHLRKKLVDSTDKADLRLIYLALAHMIKFRGHFLIEGDLNPDNSDVDKLFIQLVQTYNQLFEENPINASGVDAKAILSARLSKSRRLENLIAQLPGEKKNGLFGNLIALSLGLTPNFKSNFDLAEDAKLQLSKDTYDDDLDNLLAQIGDQYADLFLAAKNLSDAILLSDILRVNTEITKAPLSASMIKRYDEHHQDLTLLKALVRQQLPEKYKEIFFDQSKNGYAGYIDGGASQEEFYKFIKPILEKMDGTEELLVKLNREDLLRKQRTFDNGSIPHQIHLGELHAILRRQEDFYPFLKDNREKIEKILTFRIPYYVGPLARGNSRFAWMTRKSEETITPWNFEEVVDKGASAQSFIERMTNFDKNLPNEKVLPKHSLLYEYFTVYNELTKVKYVTEGMRKPAFLSGEQKKAIVDLLFKTNRKVTVKQLKEDYFKKIECFDSVEISGVEDRFNASLGTYHDLLKIIKDKDFLDNEENEDILEDIVLTLTLFEDREMIEERLKTYAHLFDDKVMKQLKRRRYTGWGRLSRKLINGIRDKQSGKTILDFLKSDGFANRNFMQLIHDDSLTFKEDIQKAQVSGQGDSLHEHIANLAGSPAIKKGILQTVKVVDELVKVMGRHKPENIVIEMARENQTTQKGQKNSRERMKRIEEGIKELGSQILKEHPVENTQLQNEKLYLYYLQNGRDMYVDQELDINRLSDYDVDHIVPQSFLKDDSIDNKVLTRSDKNRGKSDNVPSEEVVKKMKNYWRQLLNAKLITQRKFDNLTKAERGGLSELDKAGFIKRQLVETRQITKHVAQILDSRMNTKYDENDKLIREVKVITLKSKLVSDFRKDFQFYKVREINNYHHAHDAYLNAVVGTALIKKYPKLESEFVYGDYKVYDVRKMIAKSEQEIGKATAKYFFYSNIMNFFKTEITLANGEIRKRPLIETNGETGEIVWDKGRDFATVRKVLSMPQVNIVKKTEVQTGGFSKESIRPKRNSDKLIARKKDWDPKKYGGFLWPTVAYSVLVVAKVEKGKSKKLKSVKELLGITIMERSSFEKNPIDFLEAKGYKEVKKDLIIKLPKYSLFELENGRKRMLASAKQLQKGNELALPSKYVNFLYLASHYEKLKGSPEDNEQKQLFVEQHKHYLDEIIEQISEFSKRVILADANLDKVLSAYNKHRDKPIREQAENIIHLFTLTRLGAPRAFKYFDTTIDPKQYRSTKEVLDATLIHQSITGLYETRIDLSQLGGD

SEQ ID NO: 14845 - protein, 1368 aa, synthetic construct
MDKKYSIGLDIGTNSVGWAVITDEYKVPSKKFKVLGNTDRHSIKKNLIGALLFDSGETAERTRLKRTARRRYTRRKNRICYLQEIFSNEMAKVDDSFFHRLEESFLVEEDKKHERHPIFGNIVDEVAYHEKYPTIYHLRKKLVDSTDKADLRLIYLALAHMIKFRGHFLIEGDLNPDNSDVDKLFIQLVQTYNQLFEENPINASGVDAKAILSARLSKSRRLENLIAQLPGEKKNGLFGNLIALSLGLTPNFKSNFDLAEDAKLQLSKDTYDDDLDNLLAQIGDQYADLFLAAKNLSDAILLSDILRVNTEITKAPLSASMIKRYDEHHQDLTLLKALVRQQLPEKYKEIFFDQSKNGYAGYIDGGASQEEFYKFIKPILEKMDGTEELLVKLNREDLLRKQRTFDNGSIPHQIHLGELHAILRRQEDFYPFLKDNREKIEKILTFRIPYYVGPLARGNSRFAWMTRKSEETITPWNFEEVVDKGASAQSFIERMTNFDKNLPNEKVLPKHSLLYEYFTVYNELTKVKYVTEGMRKPAFLSGEQKKAIVDLLFKTNRKVTVKQLKEDYFKKIECFDSVEISGVEDRFNASLGTYHDLLKIIKDKDFLDNEENEDILEDIVLTLTLFEDREMIEERLKTYAHLFDDKVMKQLKRRRYTGWGRLSRKLINGIRDKQSGKTILDFLKSDGFANRNFMQLIHDDSLTFKEDIQKAQVSGQGDSLHEHIANLAGSPAIKKGILQTVKVVDELVKVMGRHKPENIVIEMARENQTTQKGQKNSRERMKRIEEGIKELGSQILKEHPVENTQLQNEKLYLYYLQNGRDMYVDQELDINRLSDYDVDAIVPQSFLKDDSIDNKVLTRSDKNRGKSDNVPSEEVVKKMKNYWRQLLNAKLITQRKFDNLTKAERGGLSELDKAGFIKRQLVETRQITKHVAQILDSRMNTKYDENDKLIREVKVITLKSKLVSDFRKDFQFYKVREINNYHHAHDAYLNAVVGTALIKKYPKLESEFVYGDYKVYDVRKMIAKSEQEIGKATAKYFFYSNIMNFFKTEITLANGEIRKRPLIETNGETGEIVWDKGRDFATVRKVLSMPQVNIVKKTEVQTGGFSKESIRPKRNSDKLIARKKDWDPKKYGGFLWPTVAYSVLVVAKVEKGKSKKLKSVKELLGITIMERSSFEKNPIDFLEAKGYKEVKKDLIIKLPKYSLFELENGRKRMLASAKQLQKGNELALPSKYVNFLYLASHYEKLKGSPEDNEQKQLFVEQHKHYLDEIIEQISEFSKRVILADANLDKVLSAYNKHRDKPIREQAENIIHLFTLTRLGAPRAFKYFDTTIDPKQYRSTKEVLDATLIHQSITGLYETRIDLSQLGGD

SEQ ID NO: 14846 - protein, 1367 aa, synthetic construct
DKKYSIGLDIGTNSVGWAVITDEYKVPSKKFKVLGNTDRHSIKKNLIGALLFDSGETAERTRLKRTARRRYTRRKNRICYLQEIFSNEMAKVDDSFFHRLEESFLVEEDKKHERHPIFGNIVDEVAYHEKYPTIYHLRKKLVDSTDKADLRLIYLALAHMIKFRGHFLIEGDLNPDNSDVDKLFIQLVQTYNQLFEENPINASGVDAKAILSARLSKSRRLENLIAQLPGEKKNGLFGNLIALSLGLTPNFKSNFDLAEDAKLQLSKDTYDDDLDNLLAQIGDQYADLFLAAKNLSDAILLSDILRVNTEITKAPLSASMIKRYDEHHQDLTLLKALVRQQLPEKYKEIFFDQSKNGYAGYIDGGASQEEFYKFIKPILEKMDGTEELLVKLNREDLLRKQRTFDNGSIPHQIHLGELHAILRRQEDFYPFLKDNREKIEKILTFRIPYYVGPLARGNSRFAWMTRKSEETITPWNFEEVVDKGASAQSFIERMTNFDKNLPNEKVLPKHSLLYEYFTVYNELTKVKYVTEGMRKPAFLSGEQKKAIVDLLFKTNRKVTVKQLKEDYFKKIECFDSVEISGVEDRFNASLGTYHDLLKIIKDKDFLDNEENEDILEDIVLTLTLFEDREMIEERLKTYAHLFDDKVMKQLKRRRYTGWGRLSRKLINGIRDKQSGKTILDFLKSDGFANRNFMQLIHDDSLTFKEDIQKAQVSGQGDSLHEHIANLAGSPAIKKGILQTVKVVDELVKVMGRHKPENIVIEMARENQTTQKGQKNSRERMKRIEEGIKELGSQILKEHPVENTQLQNEKLYLYYLQNGRDMYVDQELDINRLSDYDVDAIVPQSFLKDDSIDNKVLTRSDKNRGKSDNVPSEEVVKKMKNYWRQLLNAKLITQRKFDNLTKAERGGLSELDKAGFIKRQLVETRQITKHVAQILDSRMNTKYDENDKLIREVKVITLKSKLVSDFRKDFQFYKVREINNYHHAHDAYLNAVVGTALIKKYPKLESEFVYGDYKVYDVRKMIAKSEQEIGKATAKYFFYSNIMNFFKTEITLANGEIRKRPLIETNGETGEIVWDKGRDFATVRKVLSMPQVNIVKKTEVQTGGFSKESIRPKRNSDKLIARKKDWDPKKYGGFLWPTVAYSVLVVAKVEKGKSKKLKSVKELLGITIMERSSFEKNPIDFLEAKGYKEVKKDLIIKLPKYSLFELENGRKRMLASAKQLQKGNELALPSKYVNFLYLASHYEKLKGSPEDNEQKQLFVEQHKHYLDEIIEQISEFSKRVILADANLDKVLSAYNKHRDKPIREQAENIIHLFTLTRLGAPRAFKYFDTTIDPKQYRSTKEVLDATLIHQSITGLYETRIDLSQLGGD

SEQ ID NO: 14847 - protein, 1057 aa, synthetic construct
MNQKFILGLDIGITSVGYGLIDYETKNIIDAGVRLFPEANVENNEGRRSKRGSRRLKRRRIHRLERVKLLLTEYDLINKEQIPTSNNPYQIRVKGLSEILSKDELAIALLHLAKRRGIHNVDVAADKEETASDSLSTKDQINKNAKFLESRYVCELQKERLENEGHVRGVENRFLTKDIVREAKKIIDTQMQYYPEIDETFKEKYISLVETRREYFEGPGQGSPFGWNGDLKKWYEMLMGHCTYFPQELRSVKYAYSADLFNALNDLNNLIIQRDNSEKLEYHEKYHIIENVFKQKKKPTLKQIAKEIGVNPEDIKGYRITKSGTPEFTSFKLFHDLKKVVKDHAILDDIDLLNQIAEILTIYQDKDSIVAELGQLEYLMSEADKQSISELTGYTGTHSLSLKCMNMIIDELWHSSMNQMEVFTYLNMRPKKYELKGYQRIPTDMIDDAILSPVVKRTFIQSINVINKVIEKYGIPEDIIIELARENNSDDRKKFINNLQKKNEATRKRINEIIGQTGNQNAKRIVEKIRLHDQQEGKCLYSLESIPLEDLLNNPNHYEVDHIIPRSVSFDNSYHNKVLVKQSENSKKSNLTPYQYFNSGKSKLSYNQFKQHILNLSKSQDRISKKKKEYLLEERDINKFEVQKEFINRNLVDTRYATRELTNYLKAYFSANNMNVKVKTINGSFTDYLRKVWKFKKERNHGYKHHAEDALIIANADFLFKENKKLKAVNSVLEKPEIETKQLDIQVDSEDNYSEMFIIPKQVQDIKDFRNFKYSHRVDKKPNRQLINDTLYSTRKKDNSTYIVQTIKDIYAKDNTTLKKQFDKSPEKFLMYQHDPRTFEKLEVIMKQYANEKNPLAKYHEETGEYLTKYSKKNNGPIVKSLKYIGNKLGSHLDVTHQFKSSTKKLVKLSIKNYRFDVYLTEKGYKFVTIAYLNVFKKDNYYYIPKDKYQELKEKKKIKDTDQFIASFYKNDLIKLNGDLYKIIGVNSDDRNIIELDYYDIKYKDYCEINNIKGEPRIKKTIGKKTESIEKFTTDVLGNLYLHSTEKAPQLIFKRGL

SEQ ID NO: 14848 - protein, 1057 aa, synthetic construct
MNQKFILGLDIGITSVGYGLIDYETKNIIDAGVRLFPEANVENNEGRRSKRGSRRLKRRRIHRLERVKLLLTEYDLINKEQIPTSNNPYQIRVKGLSEILSKDELAIALLHLAKRRGIHNVDVAADKEETASDSLSTKDQINKNAKFLESRYVCELQKERLENEGHVRGVENRFLTKDIVREAKKIIDTQMQYYPEIDETFKEKYISLVETRREYFEGPGQGSPFGWNGDLKKWYEMLMGHCTYFPQELRSVKYAYSADLFNALNDLNNLIIQRDNSEKLEYHEKYHIIENVFKQKKKPTLKQIAKEIGVNPEDIKGYRITKSGTPEFTSFKLFHDLKKVVKDHAILDDIDLLNQIAEILTIYQDKDSIVAELGQLEYLMSEADKQSISELTGYTGTHSLSLKCMNMIIDELWHSSMNQMEVFTYLNMRPKKYELKGYQRIPTDMIDDAILSPVVKRTFIQSINVINKVIEKYGIPEDIIIELARENNSDDRKKFINNLQKKNEATRKRINEIIGQTGNQNAKRIVEKIRLHDQQEGKCLYSLESIPLEDLLNNPNHYEVDHIIPRSVSFDNSYHNKVLVKQSEASKKSNLTPYQYFNSGKSKLSYNQFKQHILNLSKSQDRISKKKKEYLLEERDINKFEVQKEFINRNLVDTRYATRELTNYLKAYFSANNMNVKVKTINGSFTDYLRKVWKFKKERNHGYKHHAEDALIIANADFLFKENKKLKAVNSVLEKPEIETKQLDIQVDSEDNYSEMFIIPKQVQDIKDFRNFKYSHRVDKKPNRQLINDTLYSTRKKDNSTYIVQTIKDIYAKDNTTLKKQFDKSPEKFLMYQHDPRTFEKLEVIMKQYANEKNPLAKYHEETGEYLTKYSKKNNGPIVKSLKYIGNKLGSHLDVTHQFKSSTKKLVKLSIKNYRFDVYLTEKGYKFVTIAYLNVFKKDNYYYIPKDKYQELKEKKKIKDTDQFIASFYKNDLIKLNGDLYKIIGVNSDDRNIIELDYYDIKYKDYCEINNIKGEPRIKKTIGKKTESIEKFTTDVLGNLYLHSTEKAPQLIFKRGL

SEQ ID NO: 14849 - protein, 1056 aa, synthetic construct
NQKFILGLDIGITSVGYGLIDYETKNIIDAGVRLFPEANVENNEGRRSKRGSRRLKRRRIHRLERVKLLLTEYDLINKEQIPTSNNPYQIRVKGLSEILSKDELAIALLHLAKRRGIHNVDVAADKEETASDSLSTKDQINKNAKFLESRYVCELQKERLENEGHVRGVENRFLTKDIVREAKKIIDTQMQYYPEIDETFKEKYISLVETRREYFEGPGQGSPFGWNGDLKKWYEMLMGHCTYFPQELRSVKYAYSADLFNALNDLNNLIIQRDNSEKLEYHEKYHIIENVFKQKKKPTLKQIAKEIGVNPEDIKGYRITKSGTPEFTSFKLFHDLKKVVKDHAILDDIDLLNQIAEILTIYQDKDSIVAELGQLEYLMSEADKQSISELTGYTGTHSLSLKCMNMIIDELWHSSMNQMEVFTYLNMRPKKYELKGYQRIPTDMIDDAILSPVVKRTFIQSINVINKVIEKYGIPEDIIIELARENNSDDRKKFINNLQKKNEATRKRINEIIGQTGNQNAKRIVEKIRLHDQQEGKCLYSLESIPLEDLLNNPNHYEVDHIIPRSVSFDNSYHNKVLVKQSEASKKSNLTPYQYFNSGKSKLSYNQFKQHILNLSKSQDRISKKKKEYLLEERDINKFEVQKEFINRNLVDTRYATRELTNYLKAYFSANNMNVKVKTINGSFTDYLRKVWKFKKERNHGYKHHAEDALIIANADFLFKENKKLKAVNSVLEKPEIETKQLDIQVDSEDNYSEMFIIPKQVQDIKDFRNFKYSHRVDKKPNRQLINDTLYSTRKKDNSTYIVQTIKDIYAKDNTTLKKQFDKSPEKFLMYQHDPRTFEKLEVIMKQYANEKNPLAKYHEETGEYLTKYSKKNNGPIVKSLKYIGNKLGSHLDVTHQFKSSTKKLVKLSIKNYRFDVYLTEKGYKFVTIAYLNVFKKDNYYYIPKDKYQELKEKKKIKDTDQFIASFYKNDLIKLNGDLYKIIGVNSDDRNIIELDYYDIKYKDYCEINNIKGEPRIKKTIGKKTESIEKFTTDVLGNLYLHSTEKAPQLIFKRGL

SEQ ID NO: 14850 - protein, 1057 aa, synthetic construct
MNQKFILGLDIGITSVGYGLIDYETKNIIDAGVRLFPEANVENNEGRRSKRGSRRLKRRRIHRLERVKLLLTEYDLINKEQIPTSNNPYQIRVKGLSEILSKDELAIALLHLAKRRGIHNVDVAADKEETASDSLSTKDQINKNAKFLESRYVCELQKERLENEGHVRGVENRFLTKDIVREAKKIIDTQMQYYPEIDETFKEKYISLVETRREYFEGPGQGSPFGWNGDLKKWYEMLMGHCTYFPQELRSVKYAYSADLFNALNDLNNLIIQRDNSEKLEYHEKYHIIENVFKQKKKPTLKQIAKEIGVNPEDIKGYRITKSGTPEFTSFKLFHDLKKVVKDHAILDDIDLLNQIAEILTIYQDKDSIVAELGQLEYLMSEADKQSISELTGYTGTHSLSLKCMNMIIDELWHSSMNQMEVFTYLNMRPKKYELKGYQRIPTDMIDDAILSPVVKRTFIQSINVINKVIEKYGIPEDIIIELARENNSDDRKKFINNLQKKNEATRKRINEIIGQTGNQNAKRIVEKIRLHDQQEGKCLYSLESIPLEDLLNNPNHYEVDHIIPRSVSFDNSYHNKVLVKQSENSKKSNLTPYQYFNSGKSKLSYNQFKQHILNLSKSQDRISKKKKEYLLEERDINKFEVQKEFINRNLVDTRYATRELTSYLKAYFSANNMDVKVKTINGSFTNHLRKVWRFDKYRNHGYKHHAEDALIIANADFLFKENKKLQNTNKILEKPTIENNTKKVTVEKEEDYNNVFETPKLVEDIKQYRDYKFSHRVDKKPNRQLINDTLYSTRMKDEHDYIVQTITDIYGKDNTNLKKQFNKNPEKFLMYQNDPKTFEKLSIIMKQYSDEKNPLAKYYEETGEYLTKYSKKNNGPIVKKIKLLGNKVGNHLDVTNKYENSTKKLVKLSIKNYRFDVYLTEKGYKFVTIAYLNVFKKDNYYYIPKDKYQELKEKKKIKDTDQFIASFYKNDLIKLNGDLYKIIGVNSDDRNIIELDYYDIKYKDYCEINNIKGEPRIKKTIGKKTESIEKFTTDVLGNLYLHSTEKAPQLIFKRGL

SEQ ID NO: 14851 - protein, 1057 aa, synthetic construct
MNQKFILGLDIGITSVGYGLIDYETKNIIDAGVRLFPEANVENNEGRRSKRGSRRLKRRRIHRLERVKLLLTEYDLINKEQIPTSNNPYQIRVKGLSEILSKDELAIALLHLAKRRGIHNVDVAADKEETASDSLSTKDQINKNAKFLESRYVCELQKERLENEGHVRGVENRFLTKDIVREAKKIIDTQMQYYPEIDETFKEKYISLVETRREYFEGPGQGSPFGWNGDLKKWYEMLMGHCTYFPQELRSVKYAYSADLFNALNDLNNLIIQRDNSEKLEYHEKYHIIENVFKQKKKPTLKQIAKEIGVNPEDIKGYRITKSGTPEFTSFKLFHDLKKVVKDHAILDDIDLLNQIAEILTIYQDKDSIVAELGQLEYLMSEADKQSISELTGYTGTHSLSLKCMNMIIDELWHSSMNQMEVFTYLNMRPKKYELKGYQRIPTDMIDDAILSPVVKRTFIQSINVINKVIEKYGIPEDIIIELARENNSDDRKKFINNLQKKNEATRKRINEIIGQTGNQNAKRIVEKIRLHDQQEGKCLYSLESIPLEDLLNNPNHYEVDHIIPRSVSFDNSYHNKVLVKQSEASKKSNLTPYQYFNSGKSKLSYNQFKQHILNLSKSQDRISKKKKEYLLEERDINKFEVQKEFINRNLVDTRYATRELTSYLKAYFSANNMDVKVKTINGSFTNHLRKVWRFDKYRNHGYKHHAEDALIIANADFLFKENKKLQNTNKILEKPTIENNTKKVTVEKEEDYNNVFETPKLVEDIKQYRDYKFSHRVDKKPNRQLINDTLYSTRMKDEHDYIVQTITDIYGKDNTNLKKQFNKNPEKFLMYQNDPKTFEKLSIIMKQYSDEKNPLAKYYEETGEYLTKYSKKNNGPIVKKIKLLGNKVGNHLDVTNKYENSTKKLVKLSIKNYRFDVYLTEKGYKFVTIAYLNVFKKDNYYYIPKDKYQELKEKKKIKDTDQFIASFYKNDLIKLNGDLYKIIGVNSDDRNIIELDYYDIKYKDYCEINNIKGEPRIKKTIGKKTESIEKFTTDVLGNLYLHSTEKAPQLIFKRGL

SEQ ID NO: 14852 - protein, 1056 aa, synthetic construct
NQKFILGLDIGITSVGYGLIDYETKNIIDAGVRLFPEANVENNEGRRSKRGSRRLKRRRIHRLERVKLLLTEYDLINKEQIPTSNNPYQIRVKGLSEILSKDELAIALLHLAKRRGIHNVDVAADKEETASDSLSTKDQINKNAKFLESRYVCELQKERLENEGHVRGVENRFLTKDIVREAKKIIDTQMQYYPEIDETFKEKYISLVETRREYFEGPGQGSPFGWNGDLKKWYEMLMGHCTYFPQELRSVKYAYSADLFNALNDLNNLIIQRDNSEKLEYHEKYHIIENVFKQKKKPTLKQIAKEIGVNPEDIKGYRITKSGTPEFTSFKLFHDLKKVVKDHAILDDIDLLNQIAEILTIYQDKDSIVAELGQLEYLMSEADKQSISELTGYTGTHSLSLKCMNMIIDELWHSSMNQMEVFTYLNMRPKKYELKGYQRIPTDMIDDAILSPVVKRTFIQSINVINKVIEKYGIPEDIIIELARENNSDDRKKFINNLQKKNEATRKRINEIIGQTGNQNAKRIVEKIRLHDQQEGKCLYSLESIPLEDLLNNPNHYEVDHIIPRSVSFDNSYHNKVLVKQSEASKKSNLTPYQYFNSGKSKLSYNQFKQHILNLSKSQDRISKKKKEYLLEERDINKFEVQKEFINRNLVDTRYATRELTSYLKAYFSANNMDVKVKTINGSFTNHLRKVWRFDKYRNHGYKHHAEDALIIANADFLFKENKKLQNTNKILEKPTIENNTKKVTVEKEEDYNNVFETPKLVEDIKQYRDYKFSHRVDKKPNRQLINDTLYSTRMKDEHDYIVQTITDIYGKDNTNLKKQFNKNPEKFLMYQNDPKTFEKLSIIMKQYSDEKNPLAKYYEETGEYLTKYSKKNNGPIVKKIKLLGNKVGNHLDVTNKYENSTKKLVKLSIKNYRFDVYLTEKGYKFVTIAYLNVFKKDNYYYIPKDKYQELKEKKKIKDTDQFIASFYKNDLIKLNGDLYKIIGVNSDDRNIIELDYYDIKYKDYCEINNIKGEPRIKKTIGKKTESIEKFTTDVLGNLYLHSTEKAPQLIFKRGL

SEQ ID NO: 14853 - protein, 1368 aa, synthetic construct
MDKKYSIGLDIGTNSVGWAVITDEYKVPSKKFKVLGNTDRHSIKKNLIGALLFDSGETAEATRLKRTARRRYTRRKNRICYLQEIFSNEMAKVDDSFFHRLEESFLVEEDKKHERHPIFGNIVDEVAYHEKYPTIYHLRKKLVDSTDKADLRLIYLALAHMIKFRGHFLIEGDLNPDNSDVDKLFIQLVQTYNQLFEENPINASGVDAKAILSARLSKSRRLENLIAQLPGEKKNGLFGNLIALSLGLTPNFKSNFDLAEDAKLQLSKDTYDDDLDNLLAQIGDQYADLFLAAKNLSDAILLSDILRVNTEITKAPLSASMIKRYDEHHQDLTLLKALVRQQLPEKYKEIFFDQSKNGYAGYIDGGASQEEFYKFIKPILEKMDGTEELLVKLNREDLLRKQRTFDNGSIPHQIHLGELHAILRRQEDFYPFLKDNREKIEKILTFRIPYYVGPLARGNSRFAWMTRKSEETITPWNFEEVVDKGASAQSFIERMTNFDKNLPNEKVLPKHSLLYEYFTVYNELTKVKYVTEGMRKPAFLSGEQKKAIVDLLFKTNRKVTVKQLKEDYFKKIECFDSVEISGVEDRFNASLGTYHDLLKIIKDKDFLDNEENEDILEDIVLTLTLFEDREMIEERLKTYAHLFDDKVMKQLKRRRYTGWGRLSRKLINGIRDKQSGKTILDFLKSDGFANRNFMQLIHDDSLTFKEDIQKAQVSGQGDSLHEHIANLAGSPAIKKGILQTVKVVDELVKVMGRHKPENIVIEMARENQTTQKGQKNSRERMKRIEEGIKELGSQILKEHPVENTQLQNEKLYLYYLQNGRDMYVDQELDINRLSDYDVDHIVPQSFLKDDSIDNKVLTRSDKNRGKSDNVPSEEVVKKMKNYWRQLLNAKLITQRKFDNLTKAERGGLSELDKAGFIKRQLVETRQITKHVAQILDSRMNTKYDENDKLIREVKVITLKSKLVSDFRKDFQFYKVREINNYHHAHDAYLNAVVGTALIKKYPKLESEFVYGDYKVYDVRKMIAKSEQEIGKATAKYFFYSNIMNFFKTEITLANGEIRKRPLIETNGETGEIVWDKGRDFATVRKVLSMPQVNIVKKTEVQTGGFSKESILPKRNSDKLIARKKDWDPKKYGGFLWPTVAYSVLVVAKVEKGKSKKLKSVKELLGITIMERSSFEKNPIDFLEAKGYKEVKKDLIIKLPKYSLFELENGRKRMLASAKQLQKGNELALPSKYVNFLYLASHYEKLKGSPEDNEQKQLFVEQHKHYLDEIIEQISEFSKRVILADANLDKVLSAYNKHRDKPIREQAENIIHLFTLTNLGAPAAFKYFDTTIDRKQYRSTKEVLDATLIHQSITGLYETRIDLSQLGGD

SEQ ID NO: 14854 - protein, 1368 aa, synthetic construct
MDKKYSIGLDIGTNSVGWAVITDEYKVPSKKFKVLGNTDRHSIKKNLIGALLFDSGETAEATRLKRTARRRYTRRKNRICYLQEIFSNEMAKVDDSFFHRLEESFLVEEDKKHERHPIFGNIVDEVAYHEKYPTIYHLRKKLVDSTDKADLRLIYLALAHMIKFRGHFLIEGDLNPDNSDVDKLFIQLVQTYNQLFEENPINASGVDAKAILSARLSKSRRLENLIAQLPGEKKNGLFGNLIALSLGLTPNFKSNFDLAEDAKLQLSKDTYDDDLDNLLAQIGDQYADLFLAAKNLSDAILLSDILRVNTEITKAPLSASMIKRYDEHHQDLTLLKALVRQQLPEKYKEIFFDQSKNGYAGYIDGGASQEEFYKFIKPILEKMDGTEELLVKLNREDLLRKQRTFDNGSIPHQIHLGELHAILRRQEDFYPFLKDNREKIEKILTFRIPYYVGPLARGNSRFAWMTRKSEETITPWNFEEVVDKGASAQSFIERMTNFDKNLPNEKVLPKHSLLYEYFTVYNELTKVKYVTEGMRKPAFLSGEQKKAIVDLLFKTNRKVTVKQLKEDYFKKIECFDSVEISGVEDRFNASLGTYHDLLKIIKDKDFLDNEENEDILEDIVLTLTLFEDREMIEERLKTYAHLFDDKVMKQLKRRRYTGWGRLSRKLINGIRDKQSGKTILDFLKSDGFANRNFMQLIHDDSLTFKEDIQKAQVSGQGDSLHEHIANLAGSPAIKKGILQTVKVVDELVKVMGRHKPENIVIEMARENQTTQKGQKNSRERMKRIEEGIKELGSQILKEHPVENTQLQNEKLYLYYLQNGRDMYVDQELDINRLSDYDVDAIVPQSFLKDDSIDNKVLTRSDKNRGKSDNVPSEEVVKKMKNYWRQLLNAKLITQRKFDNLTKAERGGLSELDKAGFIKRQLVETRQITKHVAQILDSRMNTKYDENDKLIREVKVITLKSKLVSDFRKDFQFYKVREINNYHHAHDAYLNAVVGTALIKKYPKLESEFVYGDYKVYDVRKMIAKSEQEIGKATAKYFFYSNIMNFFKTEITLANGEIRKRPLIETNGETGEIVWDKGRDFATVRKVLSMPQVNIVKKTEVQTGGFSKESILPKRNSDKLIARKKDWDPKKYGGFLWPTVAYSVLVVAKVEKGKSKKLKSVKELLGITIMERSSFEKNPIDFLEAKGYKEVKKDLIIKLPKYSLFELENGRKRMLASAKQLQKGNELALPSKYVNFLYLASHYEKLKGSPEDNEQKQLFVEQHKHYLDEIIEQISEFSKRVILADANLDKVLSAYNKHRDKPIREQAENIIHLFTLTNLGAPAAFKYFDTTIDRKQYRSTKEVLDATLIHQSITGLYETRIDLSQLGGD

SEQ ID NO: 14855 - protein, 1367 aa, synthetic construct
DKKYSIGLDIGTNSVGWAVITDEYKVPSKKFKVLGNTDRHSIKKNLIGALLFDSGETAEATRLKRTARRRYTRRKNRICYLQEIFSNEMAKVDDSFFHRLEESFLVEEDKKHERHPIFGNIVDEVAYHEKYPTIYHLRKKLVDSTDKADLRLIYLALAHMIKFRGHFLIEGDLNPDNSDVDKLFIQLVQTYNQLFEENPINASGVDAKAILSARLSKSRRLENLIAQLPGEKKNGLFGNLIALSLGLTPNFKSNFDLAEDAKLQLSKDTYDDDLDNLLAQIGDQYADLFLAAKNLSDAILLSDILRVNTEITKAPLSASMIKRYDEHHQDLTLLKALVRQQLPEKYKEIFFDQSKNGYAGYIDGGASQEEFYKFIKPILEKMDGTEELLVKLNREDLLRKQRTFDNGSIPHQIHLGELHAILRRQEDFYPFLKDNREKIEKILTFRIPYYVGPLARGNSRFAWMTRKSEETITPWNFEEVVDKGASAQSFIERMTNFDKNLPNEKVLPKHSLLYEYFTVYNELTKVKYVTEGMRKPAFLSGEQKKAIVDLLFKTNRKVTVKQLKEDYFKKIECFDSVEISGVEDRFNASLGTYHDLLKIIKDKDFLDNEENEDILEDIVLTLTLFEDREMIEERLKTYAHLFDDKVMKQLKRRRYTGWGRLSRKLINGIRDKQSGKTILDFLKSDGFANRNFMQLIHDDSLTFKEDIQKAQVSGQGDSLHEHIANLAGSPAIKKGILQTVKVVDELVKVMGRHKPENIVIEMARENQTTQKGQKNSRERMKRIEEGIKELGSQILKEHPVENTQLQNEKLYLYYLQNGRDMYVDQELDINRLSDYDVDAIVPQSFLKDDSIDNKVLTRSDKNRGKSDNVPSEEVVKKMKNYWRQLLNAKLITQRKFDNLTKAERGGLSELDKAGFIKRQLVETRQITKHVAQILDSRMNTKYDENDKLIREVKVITLKSKLVSDFRKDFQFYKVREINNYHHAHDAYLNAVVGTALIKKYPKLESEFVYGDYKVYDVRKMIAKSEQEIGKATAKYFFYSNIMNFFKTEITLANGEIRKRPLIETNGETGEIVWDKGRDFATVRKVLSMPQVNIVKKTEVQTGGFSKESILPKRNSDKLIARKKDWDPKKYGGFLWPTVAYSVLVVAKVEKGKSKKLKSVKELLGITIMERSSFEKNPIDFLEAKGYKEVKKDLIIKLPKYSLFELENGRKRMLASAKQLQKGNELALPSKYVNFLYLASHYEKLKGSPEDNEQKQLFVEQHKHYLDEIIEQISEFSKRVILADANLDKVLSAYNKHRDKPIREQAENIIHLFTLTNLGAPAAFKYFDTTIDRKQYRSTKEVLDATLIHQSITGLYETRIDLSQLGGD

SEQ ID NO: 14856-14861 - skipped (6 entries)

SEQ ID NO: 14862 - protein, 7 aa, synthetic construct
PKKKRKV

SEQ ID NO: 14863 - protein, 19 aa, synthetic construct
MKRTADGSEFESPKKKRKV

SEQ ID NO: 14864 - protein, 30 aa, synthetic construct
MDSLLMNRRKFLYQFKNVRWAKGRRETYLC

SEQ ID NO: 14865 - protein, 20 aa, synthetic construct
AVKRPAATKKAGQAKKKKLD

SEQ ID NO: 14866 - protein, 25 aa, synthetic construct
MSRRRKANPTKLSENAKKLAKEVEN

SEQ ID NO: 14867 - protein, 9 aa, synthetic construct
PAAKRVKLD

SEQ ID NO: 14868 - protein, 9 aa, synthetic construct
KLKIKRPVK

SEQ ID NO: 14869 - protein, 8 aa, synthetic construct
VSRKRPRP

SEQ ID NO: 14870 - protein, 10 aa, synthetic construct
EGAPPAKRAR

SEQ ID NO: 14871 - protein, 12 aa, synthetic construct
PPQPKKKPLDGE

SEQ ID NO: 14872 - protein, 21 aa, synthetic construct
SGGSKRTADGSEFEPKKKRKV

SEQ ID NO: 14873 - protein, 2117 aa, synthetic construct
MKRTADGSEFESPKKKRKVDKKYSIGLDIGTNSVGWAVITDEYKVPSKKFKVLGNTDRHSIKKNLIGALLFDSGETAEATRLKRTARRRYTRRKNRICYLQEIFSNEMAKVDDSFFHRLEESFLVEEDKKHERHPIFGNIVDEVAYHEKYPTIYHLRKKLVDSTDKADLRLIYLALAHMIKFRGHFLIEGDLNPDNSDVDKLFIQLVQTYNQLFEENPINASGVDAKAILSARLSKSRRLENLIAQLPGEKKNGLFGNLIALSLGLTPNFKSNFDLAEDAKLQLSKDTYDDDLDNLLAQIGDQYADLFLAAKNLSDAILLSDILRVNTEITKAPLSASMIKRYDEHHQDLTLLKALVRQQLPEKYKEIFFDQSKNGYAGYIDGGASQEEFYKFIKPILEKMDGTEELLVKLNREDLLRKQRTFDNGSIPHQIHLGELHAILRRQEDFYPFLKDNREKIEKILTFRIPYYVGPLARGNSRFAWMTRKSEETITPWNFEEVVDKGASAQSFIERMTNFDKNLPNEKVLPKHSLLYEYFTVYNELTKVKYVTEGMRKPAFLSGEQKKAIVDLLFKTNRKVTVKQLKEDYFKKIECFDSVEISGVEDRFNASLGTYHDLLKIIKDKDFLDNEENEDILEDIVLTLTLFEDREMIEERLKTYAHLFDDKVMKQLKRRRYTGWGRLSRKLINGIRDKQSGKTILDFLKSDGFANRNFMQLIHDDSLTFKEDIQKAQVSGQGDSLHEHIANLAGSPAIKKGILQTVKVVDELVKVMGRHKPENIVIEMARENQTTQKGQKNSRERMKRIEEGIKELGSQILKEHPVENTQLQNEKLYLYYLQNGRDMYVDQELDINRLSDYDVDAIVPQSFLKDDSIDNKVLTRSDKNRGKSDNVPSEEVVKKMKNYWRQLLNAKLITQRKFDNLTKAERGGLSELDKAGFIKRQLVETRQITKHVAQILDSRMNTKYDENDKLIREVKVITLKSKLVSDFRKDFQFYKVREINNYHHAHDAYLNAVVGTALIKKYPKLESEFVYGDYKVYDVRKMIAKSEQEIGKATAKYFFYSNIMNFFKTEITLANGEIRKRPLIETNGETGEIVWDKGRDFATVRKVLSMPQVNIVKKTEVQTGGFSKESILPKRNSDKLIARKKDWDPKKYGGFDSPTVAYSVLVVAKVEKGKSKKLKSVKELLGITIMERSSFEKNPIDFLEAKGYKEVKKDLIIKLPKYSLFELENGRKRMLASAGELQKGNELALPSKYVNFLYLASHYEKLKGSPEDNEQKQLFVEQHKHYLDEIIEQISEFSKRVILADANLDKVLSAYNKHRDKPIREQAENIIHLFTLTNLGAPAAFKYFDTTIDRKRYTSTKEVLDATLIHQSITGLYETRIDLSQLGGDSGGSSGGSSGSETPGTSESATPESSGGSSGGSSTLNIEDEYRLHETSKEPDVSLGSTWLSDFPQAWAETGGMGLAVRQAPLIIPLKATSTPVSIKQYPMSQEARLGIKPHIQRLLDQGILVPCQSPWNTPLLPVKKPGTNDYRPVQDLREVNKRVEDIHPTVPNPYNLLSGLPPSHQWYTVLDLKDAFFCLRLHPTSQPLFAFEWRDPEMGISGQLTWTRLPQGFKNSPTLFNEALHRDLADFRIQHPDLILLQYVDDLLLAATSELDCQQGTRALLQTLGNLGYRASAKKAQICQKQVKYLGYLLKEGQRWLTEARKETVMGQPTPKTPRQLREFLGKAGFCRLFIPGFAEMAAPLYPLTKPGTLFNWGPDQQKAYQEIKQALLTAPALGLPDLTKPFELFVDEKQGYAKGVLTQKLGPWRRPVAYLSKKLDPVAAGWPPCLRMVAAIAVLTKDAGKLTMGQPLVILAPHAVEALVKQPPDRWLSNARMTHYQALLLDTDRVQFGPVVALNPATLLPLPEEGLQHNCLDILAEAHGTRPDLTDQPLPDADHTWYTDGSSLLQEGQRKAGAAVTTETEVIWAKALPAGTSAQRAELIALTQALKMAEGKKLNVYTDSRYAFATAHIHGEIYRRRGWLTSEGKEIKNKDEILALLKALFLPKRLSIIHCPGHQKGHSAEARGNRMADQAARKAAITETPDTSTLLIENSSPSGGSKRTADGSEFEPKKKRKV

SEQ ID NO: 14874 - protein, 2131 aa, synthetic construct
MKRTADGSEFESPKKKRKVDKKYSIGLDIGTNSVGWAVITDEYKVPSKKFKVLGNTDRHSIKKNLIGALLFDSGETAEATRLKRTARRRYTRRKNRICYLQEIFSNEMAKVDDSFFHRLEESFLVEEDKKHERHPIFGNIVDEVAYHEKYPTIYHLRKKLVDSTDKADLRLIYLALAHMIKFRGHFLIEGDLNPDNSDVDKLFIQLVQTYNQLFEENPINASGVDAKAILSARLSKSRKLENLIAQLPGEKKNGLFGNLIALSLGLTPNFKSNFDLAEDAKLQLSKDTYDDDLDNLLAQIGDQYADLFLAAKNLSDAILLSDILRVNTEITKAPLSASMIKRYDEHHQDLTLLKALVRQQLPEKYKEIFFDQSKNGYAGYIDGGASQEEFYKFIKPILEKMDGTEELLVKLKREDLLRKQRTFDNGSIPHQIHLGELHAILRRQEDFYPFLKDNREKIEKILTFRIPYYVGPLARGNSRFAWMTRKSEETITPWNFEEVVDKGASAQSFIERMTNFDKNLPNEKVLPKHSLLYEYFTVYNELTKVKYVTEGMRKPAFLSGEQKKAIVDLLFKTNRKVTVKQLKEDYFKKIECFDSVEISGVEDRFNASLGTYHDLLKIIKDKDFLDNEENEDILEDIVLTLTLFEDREMIEERLKTYAHLFDDKVMKQLKRRRYTGWGRLSRKLINGIRDKQSGKTILDFLKSDGFANRNFMQLIHDDSLTFKEDIQKAQVSGQGDSLHEHIANLAGSPAIKKGILQTVKVVDELVKVMGRHKPENIVIEMARENQTTQKGQKNSRERMKRIEEGIKELGSQILKEHPVENTQLQNEKLYLYYLQNGRDMYVDQELDINRLSDYDVDAIVPQSFLKDDSIDNKVLTRSDKNRGKSDNVPSEEVVKKMKNYWRQLLNAKLITQRKFDNLTKAERGGLSELDKAGFIKRQLVETRQITKHVAQILDSRMNTKYDENDKLIREVKVITLKSKLVSDFRKDFQFYKVREINNYHHAHDAYLNAVVGTALIKKYPKLESEFVYGDYKVYDVRKMIAKSEQEIGKATAKYFFYSNIMNFFKTEITLANGEIRKRPLIETNGETGEIVWDKGRDFATVRKVLSMPQVNIVKKTEVQTGGFSKESILPKRNSDKLIARKKDWDPKKYGGFDSPTVAYSVLVVAKVEKGKSKKLKSVKELLGITIMERSSFEKNPIDFLEAKGYKEVKKDLIIKLPKYSLFELENGRKRMLASAGELQKGNELALPSKYVNFLYLASHYEKLKGSPEDNEQKQLFVEQHKHYLDEIIEQISEFSKRVILADANLDKVLSAYNKHRDKPIREQAENIIHLFTLTNLGAPAAFKYFDTTIDRKRYTSTKEVLDATLIHQSITGLYETRIDLSQLGGDSGGSSGGSKRTADGSEFESPKKKRKVSGGSSGGSTLNIEDEYRLHETSKEPDVSLGSTWLSDFPQAWAETGGMGLAVRQAPLIIPLKATSTPVSIKQYPMSQEARLGIKPHIQRLLDQGILVPCQSPWNTPLLPVKKPGTNDYRPVQDLREVNKRVEDIHPTVPNPYNLLSGLPPSHQWYTVLDLKDAFFCLRLHPTSQPLFAFEWRDPEMGISGQLTWTRLPQGFKNSPTLFNEALHRDLADFRIQHPDLILLQYVDDLLLAATSELDCQQGTRALLQTLGNLGYRASAKKAQICQKQVKYLGYLLKEGQRWLTEARKETVMGQPTPKTPRQLREFLGKAGFCRLFIPGFAEMAAPLYPLTKPGTLFNWGPDQQKAYQEIKQALLTAPALGLPDLTKPFELFVDEKQGYAKGVLTQKLGPWRRPVAYLSKKLDPVAAGWPPCLRMVAAIAVLTKDAGKLTMGQPLVILAPHAVEALVKQPPDRWLSNARMTHYQALLLDTDRVQFGPVVALNPATLLPLPEEGLQHNCLDILAEAHGTRPDLTDQPLPDADHTWYTDGSSLLQEGQRKAGAAVTTETEVIWAKALPAGTSAQRAELIALTQALKMAEGKKLNVYTDSRYAFATAHIHGEIYRRRGWLTSEGKEIKNKDEILALLKALFLPKRLSIIHCPGHQKGHSAEARGNRMADQAARKAAITETPDTSTLLIENSSPSGGSKRTADGSEFESPKKKRKVGSGPAAKRVKLD

SEQ ID NO: 14875 - protein, 19 aa, synthetic construct
MKRTADGSEFESPKKKRKV

SEQ ID NO: 14876 - protein, 1367 aa, synthetic construct
DKKYSIGLDIGTNSVGWAVITDEYKVPSKKFKVLGNTDRHSIKKNLIGALLFDSGETAEATRLKRTARRRYTRRKNRICYLQEIFSNEMAKVDDSFFHRLEESFLVEEDKKHERHPIFGNIVDEVAYHEKYPTIYHLRKKLVDSTDKADLRLIYLALAHMIKFRGHFLIEGDLNPDNSDVDKLFIQLVQTYNQLFEENPINASGVDAKAILSARLSKSRKLENLIAQLPGEKKNGLFGNLIALSLGLTPNFKSNFDLAEDAKLQLSKDTYDDDLDNLLAQIGDQYADLFLAAKNLSDAILLSDILRVNTEITKAPLSASMIKRYDEHHQDLTLLKALVRQQLPEKYKEIFFDQSKNGYAGYIDGGASQEEFYKFIKPILEKMDGTEELLVKLKREDLLRKQRTFDNGSIPHQIHLGELHAILRRQEDFYPFLKDNREKIEKILTFRIPYYVGPLARGNSRFAWMTRKSEETITPWNFEEVVDKGASAQSFIERMTNFDKNLPNEKVLPKHSLLYEYFTVYNELTKVKYVTEGMRKPAFLSGEQKKAIVDLLFKTNRKVTVKQLKEDYFKKIECFDSVEISGVEDRFNASLGTYHDLLKIIKDKDFLDNEENEDILEDIVLTLTLFEDREMIEERLKTYAHLFDDKVMKQLKRRRYTGWGRLSRKLINGIRDKQSGKTILDFLKSDGFANRNFMQLIHDDSLTFKEDIQKAQVSGQGDSLHEHIANLAGSPAIKKGILQTVKVVDELVKVMGRHKPENIVIEMARENQTTQKGQKNSRERMKRIEEGIKELGSQILKEHPVENTQLQNEKLYLYYLQNGRDMYVDQELDINRLSDYDVDAIVPQSFLKDDSIDNKVLTRSDKNRGKSDNVPSEEVVKKMKNYWRQLLNAKLITQRKFDNLTKAERGGLSELDKAGFIKRQLVETRQITKHVAQILDSRMNTKYDENDKLIREVKVITLKSKLVSDFRKDFQFYKVREINNYHHAHDAYLNAVVGTALIKKYPKLESEFVYGDYKVYDVRKMIAKSEQEIGKATAKYFFYSNIMNFFKTEITLANGEIRKRPLIETNGETGEIVWDKGRDFATVRKVLSMPQVNIVKKTEVQTGGFSKESILPKRNSDKLIARKKDWDPKKYGGFDSPTVAYSVLVVAKVEKGKSKKLKSVKELLGITIMERSSFEKNPIDFLEAKGYKEVKKDLIIKLPKYSLFELENGRKRMLASAGELQKGNELALPSKYVNFLYLASHYEKLKGSPEDNEQKQLFVEQHKHYLDEIIEQISEFSKRVILADANLDKVLSAYNKHRDKPIREQAENIIHLFTLTNLGAPAAFKYFDTTIDRKRYTSTKEVLDATLIHQSITGLYETRIDLSQLGGD

SEQ ID NO: 14877 - protein, 34 aa, synthetic construct
SGGSSGGSKRTADGSEFESPKKKRKVSGGSSGGS

SEQ ID NO: 14878 - skipped

SEQ ID NO: 14879 - protein, 22 aa, synthetic construct
SGGSKRTADGSEFESPKKKRKV

SEQ ID NO: 14880 - protein, 12 aa, synthetic construct
GSGPAAKRVKLD

SEQ ID NO: 14881 - protein, 150 aa, synthetic construct
  VARIANT 1..150: note = This sequence may encompass 1-30 repeating GGGGS units
GGGGSGGGGSGGGGSGGGGSGGGGSGGGGSGGGGSGGGGSGGGGSGGGGSGGGGSGGGGSGGGGSGGGGSGGGGSGGGGSGGGGSGGGGSGGGGSGGGGSGGGGSGGGGSGGGGSGGGGSGGGGSGGGGSGGGGSGGGGSGGGGSGGGGS

SEQ ID NO: 14882 - protein, 30 aa, synthetic construct
  VARIANT 1..30: note = This sequence may encompass 1-30 residues
GGGGGGGGGGGGGGGGGGGGGGGGGGGGGG

SEQ ID NO: 14883 - protein, 150 aa, synthetic construct
  VARIANT 1..150: note = This sequence may encompass 1-30 repeating EAAAK units
EAAAKEAAAKEAAAKEAAAKEAAAKEAAAKEAAAKEAAAKEAAAKEAAAKEAAAKEAAAKEAAAKEAAAKEAAAKEAAAKEAAAKEAAAKEAAAKEAAAKEAAAKEAAAKEAAAKEAAAKEAAAKEAAAKEAAAKEAAAKEAAAKEAAAK

SEQ ID NO: 14884 - protein, 90 aa, synthetic construct
  VARIANT 1..90: note = This sequence may encompass 1-30 repeating GGS units
GGSGGSGGSGGSGGSGGSGGSGGSGGSGGSGGSGGSGGSGGSGGSGGSGGSGGSGGSGGSGGSGGSGGSGGSGGSGGSGGSGGSGGSGGS

SEQ ID NO: 14885 - skipped

SEQ ID NO: 14886 - protein, 120 aa, synthetic construct
  VARIANT 1..120: note = This sequence may encompass 1-30 repeating SGGS units
SGGSSGGSSGGSSGGSSGGSSGGSSGGSSGGSSGGSSGGSSGGSSGGSSGGSSGGSSGGSSGGSSGGSSGGSSGGSSGGSSGGSSGGSSGGSSGGSSGGSSGGSSGGSSGGSSGGSSGGS

SEQ ID NO: 14887 - protein, 60 aa, synthetic construct
  VARIANT 1: note = Any amino acid
  VARIANT 3: note = Any amino acid
  VARIANT 5: note = Any amino acid
  VARIANT 7: note = Any amino acid
  VARIANT 9: note = Any amino acid
  VARIANT 11: note = Any amino acid
  VARIANT 13: note = Any amino acid
  VARIANT 15: note = Any amino acid
  VARIANT 17: note = Any amino acid
  VARIANT 19: note = Any amino acid
  VARIANT 21: note = Any amino acid
  VARIANT 23: note = Any amino acid
  VARIANT 25: note = Any amino acid
  VARIANT 27: note = Any amino acid
  VARIANT 29: note = Any amino acid
  VARIANT 31: note = Any amino acid
  VARIANT 33: note = Any amino acid
  VARIANT 35: note = Any amino acid
  VARIANT 37: note = Any amino acid
  VARIANT 39: note = Any amino acid
  VARIANT 41: note = Any amino acid
  VARIANT 43: note = Any amino acid
  VARIANT 45: note = Any amino acid
  VARIANT 47: note = Any amino acid
  VARIANT 49: note = Any amino acid
  VARIANT 51: note = Any amino acid
  VARIANT 53: note = Any amino acid
  VARIANT 55: note = Any amino acid
  VARIANT 57: note = Any amino acid
  VARIANT 59: note = Any amino acid
  VARIANT 1..60: note = This sequence may encompass 1-30 repeating XP units
XPXPXPXPXPXPXPXPXPXPXPXPXPXPXPXPXPXPXPXPXPXPXPXPXPXPXPXPXPXP

SEQ ID NO: 14888 - protein, 16 aa, synthetic construct
SGSETPGTSESATPES

SEQ ID NO: 14889 - protein, 32 aa, synthetic construct
SGGSSGGSSGSETPGTSESATPESSGGSSGGS

SEQ ID NO: 14890 - protein, 33 aa, synthetic construct
SGGSSGGSSGSETPGTSESATPESSGGSSGGSS

SEQ ID NO: 14891 - protein, 10 aa, synthetic construct
SGGSGGSGGS

SEQ ID NO: 14892 - protein, 4 aa, synthetic construct
SGGS

SEQ ID NO: 14893 - protein, 60 aa, synthetic construct
SGGSSGGSSGSETPGTSESATPESAGSYPYDVPDYAGSAAPAAKKKKLDGSGSGGSSGGS

SEQ ID NO: 14894 - RNA, 76 nt, synthetic construct
  source 1..76: mol_type = other RNA
gttttagagctagaaatagcaagttaaaataaggctagtccgttatcaacttgaaaaagtggcaccgagtcggtgc

SEQ ID NO: 14895 - RNA, 76 nt, synthetic construct
  source 1..76: mol_type = other RNA
gtttgagagctagaaatagcaagtttaaataaggctagtccgttatcaacttgaaaaagtgggaccgagtcggtcc

SEQ ID NO: 14896 - RNA, 86 nt, synthetic construct
  source 1..86: mol_type = other RNA
gtttaagagctatgctggaaacagcatagcaagtttaaataaggctagtccgttatcaacttgaaaaagtggcaccgagtcggtgc

SEQ ID NO: 14897 - protein, 1465 aa, Homo sapiens
MPEQERQITAREGASRKILSKLSLPTRAWEPAMKKSFAFDNVGYEGGLDGLGPSSQVATSTVRILGMTCQSCVKSIEDRISNLKGIISMKVSLEQGSATVKYVPSVVCLQQVCHQIGDMGFEASIAEGKAASWPSRSLPAQEAVVKLRVEGMTCQSCVSSIEGKVRKLQGVVRVKVSLSNQEAVITYQPYLIQPEDLRDHVNDMGFEAAIKSKVAPLSLGPIDIERLQSTNPKRPLSSANQNFNNSETLGHQGSHVVTLQLRIDGMHCKSCVLNIEENIGQLLGVQSIQVSLENKTAQVKYDPSCTSPVALQRAIEALPPGNFKVSLPDGAEGSGTDHRSSSSHSPGSPPRNQVQGTCSTTLIAIAGMTCASCVHSIEGMISQLEGVQQISVSLAEGTATVLYNPSVISPEELRAAIEDMGFEASVVSESCSTNPLGNHSAGNSMVQTTDGTPTSVQEVAPHTGRLPANHAPDILAKSPQSTRAVAPQKCFLQIKGMTCASCVSNIERNLQKEAGVLSVLVALMAGKAEIKYDPEVIQPLEIAQFIQDLGFEAAVMEDYAGSDGNIELTITGMTCASCVHNIESKLTRTNGITYASVALATSKALVKFDPEIIGPRDIIKIIEEIGFHASLAQRNPNAHHLDHKMEIKQWKKSFLCSLVFGIPVMALMIYMLIPSNEPHQSMVLDHNIIPGLSILNLIFFILCTFVQLLGGWYFYVQAYKSLRHRSANMDVLIVLATSIAYVYSLVILVVAVAEKAERSPVTFFDTPPMLFVFIALGRWLEHLAKSKTSEALAKLMSLQATEATVVTLGEDNLIIREEQVPMELVQRGDIVKVVPGGKFPVDGKVLEGNTMADESLITGEAMPVTKKPGSTVIAGSINAHGSVLIKATHVGNDTTLAQIVKLVEEAQMSKAPIQQLADRFSGYFVPFIIIMSTLTLVVWIVIGFIDFGVVQRYFPNPNKHISQTEVIIRFAFQTSITVLCIACPCSLGLATPTAVMVGTGVAAQNGILIKGGKPLEMAHKIKTVMFDKTGTITHGVPRVMRVLLLGDVATLPLRKVLAVVGTAEASSEHPLGVAVTKYCKEELGTETLGYCTDFQAVPGCGIGCKVSNVEGILAHSERPLSAPASHLNEAGSLPAEKDAVPQTFSVLIGNREWLRRNGLTISSDVSDAMTDHEMKGQTAILVAIDGVLCGMIAIADAVKQEAALAVHTLQSMGVDVVLITGDNRKTARAIATQVGINKVFAEVLPSHKVAKVQELQNKGKKVAMVGDGVNDSPALAQADMGVAIGTGTDVAIEAADVVLIRNDLLDVVASIHLSKRTVRRIRINLVLALIYNLVGIPIAAGVFMPIGIVLQPWMGSAAMAASSVSVVLSSLQLKCYKKPDLERYEAQAHGHMKPLTASQVSVHIGMDDRWRDSPRATPWDQVSYVSQVSLSSLTSDKPSRHSAAADDDGDKWSLLLNGRDEEQYI

SEQ ID NO: 14898 - skipped

SEQ ID NO: 14899 - protein, 2116 aa, synthetic construct
KRTADGSEFESPKKKRKVDKKYSIGLDIGTNSVGWAVITDEYKVPSKKFKVLGNTDRHSIKKNLIGALLFDSGETAEATRLKRTARRRYTRRKNRICYLQEIFSNEMAKVDDSFFHRLEESFLVEEDKKHERHPIFGNIVDEVAYHEKYPTIYHLRKKLVDSTDKADLRLIYLALAHMIKFRGHFLIEGDLNPDNSDVDKLFIQLVQTYNQLFEENPINASGVDAKAILSARLSKSRRLENLIAQLPGEKKNGLFGNLIALSLGLTPNFKSNFDLAEDAKLQLSKDTYDDDLDNLLAQIGDQYADLFLAAKNLSDAILLSDILRVNTEITKAPLSASMIKRYDEHHQDLTLLKALVRQQLPEKYKEIFFDQSKNGYAGYIDGGASQEEFYKFIKPILEKMDGTEELLVKLNREDLLRKQRTFDNGSIPHQIHLGELHAILRRQEDFYPFLKDNREKIEKILTFRIPYYVGPLARGNSRFAWMTRKSEETITPWNFEEVVDKGASAQSFIERMTNFDKNLPNEKVLPKHSLLYEYFTVYNELTKVKYVTEGMRKPAFLSGEQKKAIVDLLFKTNRKVTVKQLKEDYFKKIECFDSVEISGVEDRFNASLGTYHDLLKIIKDKDFLDNEENEDILEDIVLTLTLFEDREMIEERLKTYAHLFDDKVMKQLKRRRYTGWGRLSRKLINGIRDKQSGKTILDFLKSDGFANRNFMQLIHDDSLTFKEDIQKAQVSGQGDSLHEHIANLAGSPAIKKGILQTVKVVDELVKVMGRHKPENIVIEMARENQTTQKGQKNSRERMKRIEEGIKELGSQILKEHPVENTQLQNEKLYLYYLQNGRDMYVDQELDINRLSDYDVDAIVPQSFLKDDSIDNKVLTRSDKNRGKSDNVPSEEVVKKMKNYWRQLLNAKLITQRKFDNLTKAERGGLSELDKAGFIKRQLVETRQITKHVAQILDSRMNTKYDENDKLIREVKVITLKSKLVSDFRKDFQFYKVREINNYHHAHDAYLNAVVGTALIKKYPKLESEFVYGDYKVYDVRKMIAKSEQEIGKATAKYFFYSNIMNFFKTEITLANGEIRKRPLIETNGETGEIVWDKGRDFATVRKVLSMPQVNIVKKTEVQTGGFSKESILPKRNSDKLIARKKDWDPKKYGGFDSPTVAYSVLVVAKVEKGKSKKLKSVKELLGITIMERSSFEKNPIDFLEAKGYKEVKKDLIIKLPKYSLFELENGRKRMLASAGELQKGNELALPSKYVNFLYLASHYEKLKGSPEDNEQKQLFVEQHKHYLDEIIEQISEFSKRVILADANLDKVLSAYNKHRDKPIREQAENIIHLFTLTNLGAPAAFKYFDTTIDRKRYTSTKEVLDATLIHQSITGLYETRIDLSQLGGDSGGSSGGSSGSETPGTSESATPESSGGSSGGSSTLNIEDEYRLHETSKEPDVSLGSTWLSDFPQAWAETGGMGLAVRQAPLIIPLKATSTPVSIKQYPMSQEARLGIKPHIQRLLDQGILVPCQSPWNTPLLPVKKPGTNDYRPVQDLREVNKRVEDIHPTVPNPYNLLSGLPPSHQWYTVLDLKDAFFCLRLHPTSQPLFAFEWRDPEMGISGQLTWTRLPQGFKNSPTLFNEALHRDLADFRIQHPDLILLQYVDDLLLAATSELDCQQGTRALLQTLGNLGYRASAKKAQICQKQVKYLGYLLKEGQRWLTEARKETVMGQPTPKTPRQLREFLGKAGFCRLFIPGFAEMAAPLYPLTKPGTLFNWGPDQQKAYQEIKQALLTAPALGLPDLTKPFELFVDEKQGYAKGVLTQKLGPWRRPVAYLSKKLDPVAAGWPPCLRMVAAIAVLTKDAGKLTMGQPLVILAPHAVEALVKQPPDRWLSNARMTHYQALLLDTDRVQFGPVVALNPATLLPLPEEGLQHNCLDILAEAHGTRPDLTDQPLPDADHTWYTDGSSLLQEGQRKAGAAVTTETEVIWAKALPAGTSAQRAELIALTQALKMAEGKKLNVYTDSRYAFATAHIHGEIYRRRGWLTSEGKEIKNKDEILALLKALFLPKRLSIIHCPGHQKGHSAEARGNRMADQAARKAAITETPDTSTLLIENSSPSGGSKRTADGSEFEPKKKRKV

SEQ ID NO: 14900 - protein, 2130 aa, synthetic construct
KRTADGSEFESPKKKRKVDKKYSIGLDIGTNSVGWAVITDEYKVPSKKFKVLGNTDRHSIKKNLIGALLFDSGETAEATRLKRTARRRYTRRKNRICYLQEIFSNEMAKVDDSFFHRLEESFLVEEDKKHERHPIFGNIVDEVAYHEKYPTIYHLRKKLVDSTDKADLRLIYLALAHMIKFRGHFLIEGDLNPDNSDVDKLFIQLVQTYNQLFEENPINASGVDAKAILSARLSKSRKLENLIAQLPGEKKNGLFGNLIALSLGLTPNFKSNFDLAEDAKLQLSKDTYDDDLDNLLAQIGDQYADLFLAAKNLSDAILLSDILRVNTEITKAPLSASMIKRYDEHHQDLTLLKALVRQQLPEKYKEIFFDQSKNGYAGYIDGGASQEEFYKFIKPILEKMDGTEELLVKLKREDLLRKQRTFDNGSIPHQIHLGELHAILRRQEDFYPFLKDNREKIEKILTFRIPYYVGPLARGNSRFAWMTRKSEETITPWNFEEVVDKGASAQSFIERMTNFDKNLPNEKVLPKHSLLYEYFTVYNELTKVKYVTEGMRKPAFLSGEQKKAIVDLLFKTNRKVTVKQLKEDYFKKIECFDSVEISGVEDRFNASLGTYHDLLKIIKDKDFLDNEENEDILEDIVLTLTLFEDREMIEERLKTYAHLFDDKVMKQLKRRRYTGWGRLSRKLINGIRDKQSGKTILDFLKSDGFANRNFMQLIHDDSLTFKEDIQKAQVSGQGDSLHEHIANLAGSPAIKKGILQTVKVVDELVKVMGRHKPENIVIEMARENQTTQKGQKNSRERMKRIEEGIKELGSQILKEHPVENTQLQNEKLYLYYLQNGRDMYVDQELDINRLSDYDVDAIVPQSFLKDDSIDNKVLTRSDKNRGKSDNVPSEEVVKKMKNYWRQLLNAKLITQRKFDNLTKAERGGLSELDKAGFIKRQLVETRQITKHVAQILDSRMNTKYDENDKLIREVKVITLKSKLVSDFRKDFQFYKVREINNYHHAHDAYLNAVVGTALIKKYPKLESEFVYGDYKVYDVRKMIAKSEQEIGKATAKYFFYSNIMNFFKTEITLANGEIRKRPLIETNGETGEIVWDKGRDFATVRKVLSMPQVNIVKKTEVQTGGFSKESILPKRNSDKLIARKKDWDPKKYGGFDSPTVAYSVLVVAKVEKGKSKKLKSVKELLGITIMERSSFEKNPIDFLEAKGYKEVKKDLIIKLPKYSLFELENGRKRMLASAGELQKGNELALPSKYVNFLYLASHYEKLKGSPEDNEQKQLFVEQHKHYLDEIIEQISEFSKRVILADANLDKVLSAYNKHRDKPIREQAENIIHLFTLTNLGAPAAFKYFDTTIDRKRYTSTKEVLDATLIHQSITGLYETRIDLSQLGGDSGGSSGGSKRTADGSEFESPKKKRKVSGGSSGGSTLNIEDEYRLHETSKEPDVSLGSTWLSDFPQAWAETGGMGLAVRQAPLIIPLKATSTPVSIKQYPMSQEARLGIKPHIQRLLDQGILVPCQSPWNTPLLPVKKPGTNDYRPVQDLREVNKRVEDIHPTVPNPYNLLSGLPPSHQWYTVLDLKDAFFCLRLHPTSQPLFAFEWRDPEMGISGQLTWTRLPQGFKNSPTLFNEALHRDLADFRIQHPDLILLQYVDDLLLAATSELDCQQGTRALLQTLGNLGYRASAKKAQICQKQVKYLGYLLKEGQRWLTEARKETVMGQPTPKTPRQLREFLGKAGFCRLFIPGFAEMAAPLYPLTKPGTLFNWGPDQQKAYQEIKQALLTAPALGLPDLTKPFELFVDEKQGYAKGVLTQKLGPWRRPVAYLSKKLDPVAAGWPPCLRMVAAIAVLTKDAGKLTMGQPLVILAPHAVEALVKQPPDRWLSNARMTHYQALLLDTDRVQFGPVVALNPATLLPLPEEGLQHNCLDILAEAHGTRPDLTDQPLPDADHTWYTDGSSLLQEGQRKAGAAVTTETEVIWAKALPAGTSAQRAELIALTQALKMAEGKKLNVYTDSRYAFATAHIHGEIYRRRGWLTSEGKEIKNKDEILALLKALFLPKRLSIIHCPGHQKGHSAEARGNRMADQAARKAAITETPDTSTLLIENSSPSGGSKRTADGSEFESPKKKRKVGSGPAAKRVKLD

SEQ ID NO: 14901 - RNA, 21 nt, synthetic construct
  source 1..21: mol_type = other RNA
gttgccaagtgttccagccac

SEQ ID NO: 14902 - DNA, 92 bp, Homo sapiens
  source 1..92: mol_type = genomic DNA
tctgaacctgaagctgctgttacctttgccaagtgttccagccaccggcccagggcaatgaacacaaagagcatggggggcgtgtcgaagaa

SEQ ID NO: 14903 - protein, 23 aa, Homo sapiens
FFDTPPMLFVFIALGRWLEHLAK

SEQ ID NO: 14904 - protein, 21 aa, synthetic construct
  VARIANT 1..21: note = This sequence may encompass 1, 3, or 7 repeating GGS units
GGSGGSGGSGGSGGSGGSGGS

SEQ ID NO: 14905 - RNA, 76 nt, synthetic construct; identical to SEQ ID NO: 14894
  source 1..76: mol_type = other RNA

SEQ ID NO: 14906 - RNA, 76 nt, synthetic construct; identical to SEQ ID NO: 14895
  source 1..76: mol_type = other RNA

SEQ ID NO: 14907 - RNA, 86 nt, synthetic construct; identical to SEQ ID NO: 14896
  source 1..86: mol_type = other RNA

SEQ ID NO: 14908 - protein, 1056 aa, synthetic construct
NQKFILGLDIGITSVGYGLIDYETKNIIDAGVRLFPEANVENNEGRRSKRGSRRLKRRRIHRLERVKLLLTEYDLINKEQIPTSNNPYQIRVKGLSEILSKDELAIALLHLAKRRGIHNVDVAADKEETASDSLSTKDQINKNAKFLESRYVCELQKERLENEGHVRGVENRFLTKDIVREAKKIIDTQMQYYPEIDETFKEKYISLVETRREYFEGPGQGSPFGWNGDLKKWYEMLMGHCTYFPQELRSVKYAYSADLFNALNDLNNLIIQRDNSEKLEYHEKYHIIENVFKQKKKPTLKQIAKEIGVNPEDIKGYRITKSGTPEFTSFKLFHDLKKVVKDHAILDDIDLLNQIAEILTIYQDKDSIVAELGQLEYLMSEADKQSISELTGYTGTHSLSLKCMNMIIDELWHSSMNQMEVFTYLNMRPKKYELKGYQRIPTDMIDDAILSPVVKRTFIQSINVINKVIEKYGIPEDIIIELARENNSDDRKKFINNLQKKNEATRKRINEIIGQTGNQNAKRIVEKIRLHDQQEGKCLYSLESIPLEDLLNNPNHYEVDHIIPRSVSFDNSYHNKVLVKQSENSKKSNLTPYQYFNSGKSKLSYNQFKQHILNLSKSQDRISKKKKEYLLEERDINKFEVQKEFINRNLVDTRYATRELTNYLKAYFSANNMNVKVKTINGSFTDYLRKVWKFKKERNHGYKHHAEDALIIANADFLFKENKKLKAVNSVLEKPEIETKQLDIQVDSEDNYSEMFIIPKQVQDIKDFRNFKYSHRVDKKPNRQLINDTLYSTRKKDNSTYIVQTIKDIYAKDNTTLKKQFDKSPEKFLMYQHDPRTFEKLEVIMKQYANEKNPLAKYHEETGEYLTKYSKKNNGPIVKSLKYIGNKLGSHLDVTHQFKSSTKKLVKLSIKNYRFDVYLTEKGYKFVTIAYLNVFKKDNYYYIPKDKYQELKEKKKIKDTDQFIASFYKNDLIKLNGDLYKIIGVNSDDRNIIELDYYDIKYKDYCEINNIKGEPRIKKTIGKKTESIEKFTTDVLGNLYLHSTEKAPQLIFKRGL

SEQ ID NO: 14909 - protein, 1056 aa, synthetic construct
NQKFILGLDIGITSVGYGLIDYETKNIIDAGVRLFPEANVENNEGRRSKRGSRRLKRRRIHRLERVKLLLTEYDLINKEQIPTSNNPYQIRVKGLSEILSKDELAIALLHLAKRRGIHNVDVAADKEETASDSLSTKDQINKNAKFLESRYVCELQKERLENEGHVRGVENRFLTKDIVREAKKIIDTQMQYYPEIDETFKEKYISLVETRREYFEGPGQGSPFGWNGDLKKWYEMLMGHCTYFPQELRSVKYAYSADLFNALNDLNNLIIQRDNSEKLEYHEKYHIIENVFKQKKKPTLKQIAKEIGVNPEDIKGYRITKSGTPEFTSFKLFHDLKKVVKDHAILDDIDLLNQIAEILTIYQDKDSIVAELGQLEYLMSEADKQSISELTGYTGTHSLSLKCMNMIIDELWHSSMNQMEVFTYLNMRPKKYELKGYQRIPTDMIDDAILSPVVKRTFIQSINVINKVIEKYGIPEDIIIELARENNSDDRKKFINNLQKKNEATRKRINEIIGQTGNQNAKRIVEKIRLHDQQEGKCLYSLESIPLEDLLNNPNHYEVDHIIPRSVSFDNSYHNKVLVKQSENSKKSNLTPYQYFNSGKSKLSYNQFKQHILNLSKSQDRISKKKKEYLLEERDINKFEVQKEFINRNLVDTRYATRELTSYLKAYFSANNMDVKVKTINGSFTNHLRKVWRFDKYRNHGYKHHAEDALIIANADFLFKENKKLQNTNKILEKPTIENNTKKVTVEKEEDYNNVFETPKLVEDIKQYRDYKFSHRVDKKPNRQLINDTLYSTRMKDEHDYIVQTITDIYGKDNTNLKKQFNKNPEKFLMYQNDPKTFEKLSIIMKQYSDEKNPLAKYYEETGEYLTKYSKKNNGPIVKKIKLLGNKVGNHLDVTNKYENSTKKLVKLSIKNYRFDVYLTEKGYKFVTIAYLNVFKKDNYYYIPKDKYQELKEKKKIKDTDQFIASFYKNDLIKLNGDLYKIIGVNSDDRNIIELDYYDIKYKDYCEINNIKGEPRIKKTIGKKTESIEKFTTDVLGNLYLHSTEKAPQLIFKRGL

SEQ ID NO: 14910 - protein, 1367 aa, synthetic construct
DKKYSIGLDIGTNSVGWAVITDEYKVPSKKFKVLGNTDRHSIKKNLIGALLFDSGETAEATRLKRTARRRYTRRKNRICYLQEIFSNEMAKVDDSFFHRLEESFLVEEDKKHERHPIFGNIVDEVAYHEKYPTIYHLRKKLVDSTDKADLRLIYLALAHMIKFRGHFLIEGDLNPDNSDVDKLFIQLVQTYNQLFEENPINASGVDAKAILSARLSKSRRLENLIAQLPGEKKNGLFGNLIALSLGLTPNFKSNFDLAEDAKLQLSKDTYDDDLDNLLAQIGDQYADLFLAAKNLSDAILLSDILRVNTEITKAPLSASMIKRYDEHHQDLTLLKALVRQQLPEKYKEIFFDQSKNGYAGYIDGGASQEEFYKFIKPILEKMDGTEELLVKLNREDLLRKQRTFDNGSIPHQIHLGELHAILRRQEDFYPFLKDNREKIEKILTFRIPYYVGPLARGNSRFAWMTRKSEETITPWNFEEVVDKGASAQSFIERMTNFDKNLPNEKVLPKHSLLYEYFTVYNELTKVKYVTEGMRKPAFLSGEQKKAIVDLLFKTNRKVTVKQLKEDYFKKIECFDSVEISGVEDRFNASLGTYHDLLKIIKDKDFLDNEENEDILEDIVLTLTLFEDREMIEERLKTYAHLFDDKVMKQLKRRRYTGWGRLSRKLINGIRDKQSGKTILDFLKSDGFANRNFMQLIHDDSLTFKEDIQKAQVSGQGDSLHEHIANLAGSPAIKKGILQTVKVVDELVKVMGRHKPENIVIEMARENQTTQKGQKNSRERMKRIEEGIKELGSQILKEHPVENTQLQNEKLYLYYLQNGRDMYVDQELDINRLSDYDVDHIVPQSFLKDDSIDNKVLTRSDKNRGKSDNVPSEEVVKKMKNYWRQLLNAKLITQRKFDNLTKAERGGLSELDKAGFIKRQLVETRQITKHVAQILDSRMNTKYDENDKLIREVKVITLKSKLVSDFRKDFQFYKVREINNYHHAHDAYLNAVVGTALIKKYPKLESEFVYGDYKVYDVRKMIAKSEQEIGKATAKYFFYSNIMNFFKTEITLANGEIRKRPLIETNGETGEIVWDKGRDFATVRKVLSMPQVNIVKKTEVQTGGFSKESILPKRNSDKLIARKKDWDPKKYGGFLWPTVAYSVLVVAKVEKGKSKKLKSVKELLGITIMERSSFEKNPIDFLEAKGYKEVKKDLIIKLPKYSLFELENGRKRMLASAKQLQKGNELALPSKYVNFLYLASHYEKLKGSPEDNEQKQLFVEQHKHYLDEIIEQISEFSKRVILADANLDKVLSAYNKHRDKPIREQAENIIHLFTLTNLGAPAAFKYFDTTIDRKQYRSTKEVLDATLIHQSITGLYETRIDLSQLGGD

SEQ ID NO: 14911 - protein, 6 aa, synthetic construct
GGSGGS

SEQ ID NO: 14912 - protein, 9 aa, synthetic construct
GGSGGSGGS

SEQ ID NO: 14913 - protein, 18 aa, synthetic construct
KRTADGSEFESPKKKRKV

SEQ ID NO: 14914 - protein, 17 aa, synthetic construct
KRTADGSEFEPKKKRKV

SEQ ID NO: 14915 - protein, 19 aa, synthetic construct
NLSKRPAAIKKAGQAKKKK

SEQ ID NO: 14916 - protein, 11 aa, synthetic construct
RQRRNELKRSF

SEQ ID NO: 14917 - protein, 38 aa, synthetic construct
NQSSNFGPMKGGNFGGRSSGPYGGGGQYFAKPRNQGGY

SEQ ID NO: 14918 - protein, 16 aa, synthetic construct
  VARIANT 3: note = Any amino acid
  VARIANT 4: note = Any amino acid
  VARIANT 5: note = Any amino acid
  VARIANT 6: note = Any amino acid
  VARIANT 7: note = Any amino acid
  VARIANT 8: note = Any amino acid
  VARIANT 9: note = Any amino acid
  VARIANT 10: note = Any amino acid
  VARIANT 11: note = Any amino acid
  VARIANT 12: note = Any amino acid
KRXXXXXXXXXXKKKL

SEQ ID NO: 14919 - protein, 16 aa, synthetic construct
KRPAATKKAGQAKKKK

SEQ ID NO: 14920 - RNA, 30 nt, synthetic construct
  source 1..30: mol_type = other RNA
aacattgacgcgtctctacgtgggggcgcg

SEQ ID NO: 14921 - RNA, 55 nt, synthetic construct
  source 1..55: mol_type = other RNA
gggtcaggagccccccccctgaacccaggataaccctcaaagtcggggggcaacc

SEQ ID NO: 14922 - RNA, 60 nt, synthetic construct
  source 1..60: mol_type = other RNA
gtcagggtcaggagccccccccctgaacccaggataaccctcaaagtcggggggcaaccc

SEQ ID NO: 14923 - RNA, 56 nt, synthetic construct
  source 1..56: mol_type = other RNA
gggtcaggagccccccccctgaacccaggaaaaccctcaaagtcggggggcaaccc

SEQ ID NO: 14924 - RNA, 56 nt, synthetic construct
  source 1..56: mol_type = other RNA
gggtcaggagccccccccctgcacccaggaaaaccctcaaagtcggggggcaaccc

SEQ ID NO: 14925 - RNA, 56 nt, synthetic construct
  source 1..56: mol_type = other RNA
gggtcaggagccccccccctgcacccaggataaccctcaaagtcggggggcaaccc

SEQ ID NO: 14926 - RNA, 60 nt, synthetic construct
  source 1..60: mol_type = other RNA
gtcagggtcaggagccccccccctgaacccaggaaaaccctcaaagtcggggggcaaccc

SEQ ID NO: 14927 - RNA, 60 nt, synthetic construct
  source 1..60: mol_type = other RNA
gtcagggtcaggagccccccccctgcacccaggaaaaccctcaaagtcggggggcaaccc

SEQ ID NO: 14928 - RNA, 51 nt, synthetic construct
  source 1..51: mol_type = other RNA
gggtcaggagccccccccctgaacccaggataaccctcaaagtcggggggc

SEQ ID NO: 14929 - RNA, 13 nt, synthetic construct
  source 1..13: mol_type = other RNA
tggtggtggtggt

SEQ ID NO: 14930 - RNA, 20 nt, synthetic construct
  source 1..20: mol_type = other RNA
gggacagggcagggacaggg

SEQ ID NO: 14931 - RNA, 21 nt, synthetic construct
  source 1..21: mol_type = other RNA
gggtccgggtctgggtctggg

SEQ ID NO: 14932 - RNA, 19 nt, synthetic construct
  source 1..19: mol_type = other RNA
gggcagggtctgggctggg

SEQ ID NO: 14933 - RNA, 19 nt, synthetic construct
  source 1..19: mol_type = other RNA
gggctgggatgggaaaggg

SEQ ID NO: 14934 - RNA, 19 nt, synthetic construct
  source 1..19: mol_type = other RNA
gggctctgggtgggccggg

SEQ ID NO: 14935 - RNA, 18 nt, synthetic construct
  source 1..18: mol_type = other RNA
gggctgggctgggcaggg

SEQ ID NO: 14936 - RNA, 17 nt, synthetic construct
  source 1..17: mol_type = other RNA
gggtgggctgggaaggg

SEQ ID NO: 14937 - RNA, 17 nt, synthetic construct
  source 1..17: mol_type = other RNA
gggagggagggctaggg

SEQ ID NO: 14938 - RNA, 17 nt, synthetic construct
  source 1..17: mol_type = other RNA
gggcagggctgggaggg

SEQ ID NO: 14939 - RNA, 16 nt, synthetic construct
  source 1..16: mol_type = other RNA
gggtgggagggctggg

SEQ ID NO: 14940 - RNA, 43 nt, synthetic construct
  source 1..43: mol_type = other RNA
gcgtaacctccatccgagttgcaagagagggaaacgcagtctc

SEQ ID NO: 14941 - RNA, 160 nt, synthetic construct
  source 1..160: mol_type = other RNA
ggaattgcgggaaaggggtcaacagccgttcagtaccaagtctcaggggaaactttgagatggccttgcaaagggtatggtaataagctgacggacatggtcctaaccacgcagccaagtcctaagtcaacagatcttctgttgatatggatgcagttca

SEQ ID NO: 14942 - RNA, 42 nt, synthetic construct
  source 1..42: mol_type = other RNA
ttgacgcggttctatctagttacgcgttaaaccaactagaaa

SEQ ID NO: 14943 - RNA, 42 nt, synthetic construct
  source 1..42: mol_type = other RNA
ttgacgcggttctatctacttacgcgttaaaccaactagaaa

SEQ ID NO: 14944 - RNA, 44 nt, synthetic construct
  source 1..44: mol_type = other RNA
cgcgagtctaggggataacgcgttaaacttcctagaaggcggtt

SEQ ID NO: 14945 - RNA, 44 nt, synthetic construct
  source 1..44: mol_type = other RNA
cgcggatctagattgtaacgcgttaaaccatctagaaggcggtt

SEQ ID NO: 14946 - RNA, 44 nt, synthetic construct
  source 1..44: mol_type = other RNA
cgcgtcgctaccgcccggcgcgttaaacacactagaaggcggtt

SEQ ID NO: 14947 - RNA, 37 nt, synthetic construct
  source 1..37: mol_type = other RNA
cgcggttctatctagttacgcgttaaaccaactagaa

SEQ ID NO: 14948 - RNA, 68 nt, synthetic construct
  source 1..68: mol_type = other RNA
ggccggcatggtcccagcctcctcgctggcgccggctgggcaacatgcttcggcatggcgaatgggac

SEQ ID NO: 14949 - RNA, 18 nt, synthetic construct
  source 1..18: mol_type = other RNA
ggtgggagacgtcccacc

SEQ ID NO: 14950 - RNA, 24 nt, synthetic construct
  source 1..24: mol_type = other RNA
gagcagcatggcgtcgctgctcac

SEQ ID NO: 14951 - RNA, 21 nt, synthetic construct
  source 1..21: mol_type = other RNA
ccatcagttgacaccctgagg

SEQ ID NO: 14952 - RNA, 28 nt, synthetic construct
  source 1..28: mol_type = other RNA
gcagacctaagtggtgacatatggtctg

SEQ ID NO: 14953 - RNA, 24 nt, synthetic construct
  source 1..24: mol_type = other RNA
catgcgattagaaataatcgcatg

SEQ ID NO: 14954 - RNA, 118 nt, synthetic construct
  source 1..118: mol_type = other RNA
tctgccatcaaagctgcgaccgtgctcagtctggtgggagacgtcccaccggccggcatggtcccagcctcctcgctggcgccggctgggcaacatgcttcggcatggcgaatgggac

SEQ ID NO: 14955 - RNA, 76 nt, synthetic construct
  source 1..76: mol_type = other RNA
gttttagagctatacgtagcaagttaaaataaggctagtccgttatcaactttacgaagtggcaccgagtcggtgc

SEQ ID NO: 14956 - RNA, 76 nt, synthetic construct
  source 1..76: mol_type = other RNA
gttttagagctatacgtagcaagttaaaataaggctagtccgttatcaactttacgaagtgggaccgagtcggtcc

SEQ ID NO: 14957 - RNA, 88 nt, synthetic construct
  source 1..88: mol_type = other RNA
gttttagagctagctcatgaaaatgagctagcaagttaaaataaggctagtccgttatcaacttgaaaaagtgggaccgagtcggtcc

SEQ ID NO: 14958 - RNA, 76 nt, synthetic construct
  source 1..76: mol_type = other RNA
gtttaagagctagaaatagcaagtttaaataaggctagtccgttatcaacttgaaaaagtggcaccgagtcggtgc

SEQ ID NO: 14959 - RNA, 86 nt, synthetic construct
  source 1..86: mol_type = other RNA
gttttagagctatgctggaaacagcatagcaagttaaaataaggctagtccgttatcaacttgaaaaagtggcaccgagtcggtgc

SEQ ID NO: 14960 - DNA, 33 bp, synthetic construct
  source 1..33: mol_type = other DNA
gccaacatgaggatcacccatgtctgcagggcc

SEQ ID NO: 14961 - protein, 131 aa, synthetic construct
GSASNFTQFVLVDNGGTGDVTVAPSNFANGVAEWISSNSRSQAYKVTCSVRQSSAQNRKYTIKVEVPKVATQTVGGEELPVAGWRSYLNMELTIPIFATNSDCELIVKAMQGLLKDGNPIPSAIAANSGIY

SEQ ID NO: 14962 - RNA, 75 nt, synthetic construct
  source 1..75: mol_type = other RNA
  misc_difference 69..75: note = This region may encompass 3-7 nucleotides
ggccggcatggtcccagcctcctcgctggcgccggctgggcaacatgcttcggcatggcgaatgggacttttttt

SEQ ID NO: 14963 - RNA, 16 nt, synthetic construct
  source 1..16: mol_type = other RNA
tgggagacgtcccacc

SEQ ID NO: 14964 - RNA, 23 nt, synthetic construct
  source 1..23: mol_type = other RNA
  misc_difference 17..23: note = This region may encompass 3-7 nucleotides
tgggagacgtcccaccttttttt

SEQ ID NO: 14965 - RNA, 28 nt, synthetic construct
  source 1..28: mol_type = other RNA
  misc_difference 22..28: note = This region may encompass 3-7 nucleotides
ccatcagttgacaccctgaggttttttt

SEQ ID NO: 14966 - RNA, 31 nt, synthetic construct
  source 1..31: mol_type = other RNA
  misc_difference 25..31: note = This region may encompass 3-7 nucleotides
catgcgattagaaataatcgcatgttttttt

SEQ ID NO: 14967 - protein, 16 aa, synthetic construct
RQIKIWFQNRRMKWKK

SEQ ID NO: 14968 - protein, 9 aa, synthetic construct
RRRRRRRRR

SEQ ID NO: 14969 - protein, 8 aa, synthetic construct
RRRRRRRR

SEQ ID NO: 14970 - protein, 1367 aa, Streptococcus pyogenes
DKKYSIGLDIGTNSVGWAVITDEYKVPSKKFKVLGNTDRHSIKKNLIGALLFDSGETAEATRLKRTARRRYTRRKNRICYLQEIFSNEMAKVDDSFFHRLEESFLVEEDKKHERHPIFGNIVDEVAYHEKYPTIYHLRKKLVDSTDKADLRLIYLALAHMIKFRGHFLIEGDLNPDNSDVDKLFIQLVQTYNQLFEENPINASGVDAKAILSARLSKSRRLENLIAQLPGEKKNGLFGNLIALSLGLTPNFKSNFDLAEDAKLQLSKDTYDDDLDNLLAQIGDQYADLFLAAKNLSDAILLSDILRVNTEITKAPLSASMIKRYDEHHQDLTLLKALVRQQLPEKYKEIFFDQSKNGYAGYIDGGASQEEFYKFIKPILEKMDGTEELLVKLNREDLLRKQRTFDNGSIPHQIHLGELHAILRRQEDFYPFLKDNREKIEKILTFRIPYYVGPLARGNSRFAWMTRKSEETITPWNFEEVVDKGASAQSFIERMTNFDKNLPNEKVLPKHSLLYEYFTVYNELTKVKYVTEGMRKPAFLSGEQKKAIVDLLFKTNRKVTVKQLKEDYFKKIECFDSVEISGVEDRFNASLGTYHDLLKIIKDKDFLDNEENEDILEDIVLTLTLFEDREMIEERLKTYAHLFDDKVMKQLKRRRYTGWGRLSRKLINGIRDKQSGKTILDFLKSDGFANRNFMQLIHDDSLTFKEDIQKAQVSGQGDSLHEHIANLAGSPAIKKGILQTVKVVDELVKVMGRHKPENIVIEMARENQTTQKGQKNSRERMKRIEEGIKELGSQILKEHPVENTQLQNEKLYLYYLQNGRDMYVDQELDINRLSDYDVDHIVPQSFLKDDSIDNKVLTRSDKNRGKSDNVPSEEVVKKMKNYWRQLLNAKLITQRKFDNLTKAERGGLSELDKAGFIKRQLVETRQITKHVAQILDSRMNTKYDENDKLIREVKVITLKSKLVSDFRKDFQFYKVREINNYHHAHDAYLNAVVGTALIKKYPKLESEFVYGDYKVYDVRKMIAKSEQEIGKATAKYFFYSNIMNFFKTEITLANGEIRKRPLIETNGETGEIVWDKGRDFATVRKVLSMPQVNIVKKTEVQTGGFSKESILPKRNSDKLIARKKDWDPKKYGGFDSPTVAYSVLVVAKVEKGKSKKLKSVKELLGITIMERSSFEKNPIDFLEAKGYKEVKKDLIIKLPKYSLFELENGRKRMLASAGELQKGNELALPSKYVNFLYLASHYEKLKGSPEDNEQKQLFVEQHKHYLDEIIEQISEFSKRVILADANLDKVLSAYNKHRDKPIREQAENIIHLFTLTNLGAPAAFKYFDTTIDRKRYTSTKEVLDATLIHQSITGLYETRIDLSQLGGD

SEQ ID NO: 14971 - protein, 1367 aa, synthetic construct
DKKYSIGLDIGTNSVGWAVITDEYKVPSKKFKVLGNTDRHSIKKNLIGALLFDSGETAEATRLKRTARRRYTRRKNRICYLQEIFSNEMAKVDDSFFHRLEESFLVEEDKKHERHPIFGNIVDEVAYHEKYPTIYHLRKKLVDSTDKADLRLIYLALAHMIKFRGHFLIEGDLNPDNSDVDKLFIQLVQTYNQLFEENPINASGVDAKAILSARLSKSRRLENLIAQLPGEKKNGLFGNLIALSLGLTPNFKSNFDLAEDAKLQLSKDTYDDDLDNLLAQIGDQYADLFLAAKNLSDAILLSDILRVNTEITKAPLSASMIKRYDEHHQDLTLLKALVRQQLPEKYKEIFFDQSKNGYAGYIDGGASQEEFYKFIKPILEKMDGTEELLVKLNREDLLRKQRTFDNGSIPHQIHLGELHAILRRQEDFYPFLKDNREKIEKILTFRIPYYVGPLARGNSRFAWMTRKSEETITPWNFEEVVDKGASAQSFIERMTNFDKNLPNEKVLPKHSLLYEYFTVYNELTKVKYVTEGMRKPAFLSGEQKKAIVDLLFKTNRKVTVKQLKEDYFKKIECFDSVEISGVEDRFNASLGTYHDLLKIIKDKDFLDNEENEDILEDIVLTLTLFEDREMIEERLKTYAHLFDDKVMKQLKRRRYTGWGRLSRKLINGIRDKQSGKTILDFLKSDGFANRNFMQLIHDDSLTFKEDIQKAQVSGQGDSLHEHIANLAGSPAIKKGILQTVKVVDELVKVMGRHKPENIVIEMARENQTTQKGQKNSRERMKRIEEGIKELGSQILKEHPVENTQLQNEKLYLYYLQNGRDMYVDQELDINRLSDYDVDHIVPQSFLKDDSIDNKVLTRSDKNRGKSDNVPSEEVVKKMKNYWRQLLNAKLITQRKFDNLTKAERGGLSELDKAGFIKRQLVETRQITKHVAQILDSRMNTKYDENDKLIREVKVITLKSKLVSDFRKDFQFYKVREINNYHHAHDAYLNAVVGTALIKKYPKLESEFVYGDYKVYDVRKMIAKSEQEIGKATAKYFFYSNIMNFFKTEITLANGEIRKRPLIETNGETGEIVWDKGRDFATVRKVLSMPQVNIVKKTEVQTGGFSKESIRPKRNSDKLIARKKDWDPKKYGGFVSPTVAYSVLVVAKVEKGKSKKLKSVKELLGITIMERSSFEKNPIDFLEAKGYKEVKKDLIIKLPKYSLFELENGRKRMLASARFLQKGNELALPSKYVNFLYLASHYEKLKGSPEDNEQKQLFVEQHKHYLDEIIEQISEFSKRVILADANLDKVLSAYNKHRDKPIREQAENIIHLFTLTNLGAPRAFKYFDTTIDRKVYRSTKEVLDATLIHQSITGLYETRIDLSQLGGD

SEQ ID NO: 14972 - protein, 1367 aa, synthetic construct
DKKYSIGLDIGTNSVGWAVITDEYKVPSKKFKVLGNTDRHSIKKNLIGALLFDSGETAEATRLKRTARRRYTRRKNRICYLQEIFSNEMAKVDDSFFHRLEESFLVEEDKKHERHPIFGNIVDEVAYHEKYPTIYHLRKKLVDSTDKADLRLIYLALAHMIKFRGHFLIEGDLNPDNSDVDKLFIQLVQTYNQLFEENPINASGVDAKAILSARLSKSRRLENLIAQLPGEKKNGLFGNLIALSLGLTPNFKSNFDLAEDAKLQLSKDTYDDDLDNLLAQIGDQYADLFLAAKNLSDAILLSDILRVNTEITKAPLSASMIKRYDEHHQDLTLLKALVRQQLPEKYKEIFFDQSKNGYAGYIDGGASQEEFYKFIKPILEKMDGTEELLVKLNREDLLRKQRTFDNGSIPHQIHLGELHAILRRQEDFYPFLKDNREKIEKILTFRIPYYVGPLARGNSRFAWMTRKSEETITPWNFEEVVDKGASAQSFIERMTNFDKNLPNEKVLPKHSLLYEYFTVYNELTKVKYVTEGMRKPAFLSGEQKKAIVDLLFKTNRKVTVKQLKEDYFKKIECFDSVEISGVEDRFNASLGTYHDLLKIIKDKDFLDNEENEDILEDIVLTLTLFEDREMIEERLKTYAHLFDDKVMKQLKRRRYTGWGRLSRKLINGIRDKQSGKTILDFLKSDGFANRNFMQLIHDDSLTFKEDIQKAQVSGQGDSLHEHIANLAGSPAIKKGILQTVKVVDELVKVMGRHKPENIVIEMARENQTTQKGQKNSRERMKRIEEGIKELGSQILKEHPVENTQLQNEKLYLYYLQNGRDMYVDQELDINRLSDYDVDHIVPQSFLKDDSIDNKVLTRSDKNRGKSDNVPSEEVVKKMKNYWRQLLNAKLITQRKFDNLTKAERGGLSELDKAGFIKRQLVETRQITKHVAQILDSRMNTKYDENDKLIREVKVITLKSKLVSDFRKDFQFYKVREINNYHHAHDAYLNAVVGTALIKKYPKLESEFVYGDYKVYDVRKMIAKSEQEIGKATAKYFFYSNIMNFFKTEITLANGEIRKRPLIETNGETGEIVWDKGRDFATVRKVLSMPQVNIVKKTEVQTGGFSKESILPKRNSDKLIARKKDWDPKKYGGFVSPTVAYSVLVVAKVEKGKSKKLKSVKELLGITIMERSSFEKNPIDFLEAKGYKEVKKDLIIKLPKYSLFELENGRKRMLASARELQKGNELALPSKYVNFLYLASHYEKLKGSPEDNEQKQLFVEQHKHYLDEIIEQISEFSKRVILADANLDKVLSAYNKHRDKPIREQAENIIHLFTLTNLGAPAAFKYFDTTIDRKQYRSTKEVLDATLIHQSITGLYETRIDLSQLGGD

SEQ ID NO: 14973 - protein, 1053 aa, Staphylococcus lugdunensis
NQKFILGLDIGITSVGYGLIDYETKNIIDAGVRLFPEANVENNEGRRSKRGSRRLKRRRIHRLERVKKLLEDYNLLDQSQIPQSTNPYAIRVKGLSEALSKDELVIALLHIAKRRGIHKIDVIDSNDDVGNELSTKEQLNKNSKLLKDKFVCQIQLERMNEGQVRGEKNRFKTADIIKEIIQLLNVQKNFHQLDENFINKYIELVEMRREYFEGPGKGSPYGWEGDPKAWYETLMGHCTYFPDELRSVKYAYSADLFNALNDLNNLVIQRDGLSKLEYHEKYHIIENVFKQKKKPTLKQIANEINVNPEDIKGYRITKSGKPQFTEFKLYHDLKSVLFDQSILENEDVLDQIAEILTIYQDKDSIKSKLTELDILLNEEDKENIAQLTGYTGTHRLSLKCIRLVLEEQWYSSRNQMEIFTHLNIKPKKINLTAANKIPKAMIDEFILSPVVKRTFGQAINLINKIIEKYGVPEDIIIELARENNSKDKQKFINEMQKKNENTRKRINEIIGKYGNQNAKRLVEKIRLHDEQEGKCLYSLESIPLEDLLNNPNHYEVDHIIPRSVSFDNSYHNKVLVKQSENSKKSNLTPYQYFNSGKSKLSYNQFKQHILNLSKSQDRISKKKKEYLLEERDINKFEVQKEFINRNLVDTRYATRELTNYLKAYFSANNMNVKVKTINGSFTDYLRKVWKFKKERNHGYKHHAEDALIIANADFLFKENKKLKAVNSVLEKPEIESKQLDIQVDSEDNYSEMFIIPKQVQDIKDFRNFKYSHRVDKKPNRQLINDTLYSTRKKDNSTYIVQTIKDIYAKDNTTLKKQFDKSPEKFLMYQHDPRTFEKLEVIMKQYANEKNPLAKYHEETGEYLTKYSKKNNGPIVKSLKYIGNKLGSHLDVTHQFKSSTKKLVKLSIKPYRFDVYLTDKGYKFITISYLDVLKKDNYYYIPEQKYDKLKLGKAIDKNAKFIASFYKNDLIKLDGEIYKIIGVNSDTRNMIELDLPDIRYKEYCELNNIKGEPRIKKTIGKKVNSIEKLTTDVLGNVFTNTQYTKPQLLFKRGN

SEQ ID NO: 14974 - protein, 1052 aa, Staphylococcus aureus
KRNYILGLDIGITSVGYGIIDYETRDVIDAGVRLFKEANVENNEGRRSKRGARRLKRRRRHRIQRVKKLLFDYNLLTDHSELSGINPYEARVKGLSQKLSEEEFSAALLHLAKRRGVHNVNEVEEDTGNELSTKEQISRNSKALEEKYVAELQLERLKKDGEVRGSINRFKTSDYVKEAKQLLKVQKAYHQLDQSFIDTYIDLLETRRTYYEGPGEGSPFGWKDIKEWYEMLMGHCTYFPEELRSVKYAYNADLYNALNDLNNLVITRDENEKLEYYEKFQIIENVFKQKKKPTLKQIAKEILVNEEDIKGYRVTSTGKPEFTNLKVYHDIKDITARKEIIENAELLDQIAKILTIYQSSEDIQEELTNLNSELTQEEIEQISNLKGYTGTHNLSLKAINLILDELWHTNDNQIAIFNRLKLVPKKVDLSQQKEIPTTLVDDFILSPVVKRSFIQSIKVINAIIKKYGLPNDIIIELAREKNSKDAQKMINEMQKRNRQTNERIEEIIRTTGKENAKYLIEKIKLHDMQEGKCLYSLEAIPLEDLLNNPFNYEVDHIIPRSVSFDNSFNNKVLVKQEENSKKGNRTPFQYLSSSDSKISYETFKKHILNLAKGKGRISKTKKEYLLEERDINRFSVQKDFINRNLVDTRYATRGLMNLLRSYFRVNNLDVKVKSINGGFTSFLRRKWKFKKERNKGYKHHAEDALIIANADFIFKEWKKLDKAKKVMENQMFEEKQAESMPEIETEQEYKEIFITPHQIKHIKDFKDYKYSHRVDKKPNRELINDTLYSTRKDDKGNTLIVNNLNGLYDKDNDKLKKLINKSPEKLLMYHHDPQTYQKLKLIMEQYGDEKNPLYKYYEETGNYLTKYSKKDNGPVIKKIKYYGNKLNAHLDITDDYPNSRNKVVKLSLKPYRFDVYLDNGVYKFVTVKNLDVIKKENYYEVNSKCYEEAKKLKKISNQAEFIASFYNNDLIKINGELYRVIGVNNDLLNRIEVNMIDITYREYLENMNDKRPPRIIKTIASKTQSIKKYSTDILGNLYEVKSKKHPQIIKKG
